(19) United States
(12) Patent Application Publication
(10) Pub. No.: US 2025/0011789 A1
(43) Pub. Date: Jan. 9, 2025

(54) Modified Short Interfering Nucleic Acid (siNA) Molecules and Uses Thereof

(71) Applicants: Aligos Therapeutics, Inc., South San Francisco, CA (US); Merck Sharp & Dohme LLC, Rahway, NJ (US)

(72) Inventors: N. Tilani S. De Costa, South San Francisco, CA (US); Xuan Luong, Oakland, CA (US); Aneerban Bhattacharya, South San Francisco, CA (US); Leonid Beigelman, San Mateo, CA (US); Jerome Deval, El Granada, CA (US); Saul Martinez Montero, Newton, MA (US)

(21) Appl. No.: 18/690,562

(22) PCT Filed: Sep. 8, 2022
(86) PCT No.: PCT/US2022/042923

§ 371 Date: Mar. 8, 2024

Related U.S. Application Data
(60) Provisional application No. 63/241,940, filed on Sep. 8, 2021.

(51) Int. Cl. C12N 15/113; A61K 45/06; A61P 1/16

(52) U.S. Cl. CPC C12N 15/1137; A61K 45/06; A61P 1/16; C12N 2310/11; C12N 2310/14; C12N 2310/312; C12N 2310/315; C12N 2310/321; C12N 2310/322; C12N 2310/351

(57) ABSTRACT

Disclosed herein are short interfering nucleic acid (siNA) molecules comprising modified nucleotides and uses thereof. The siNA molecules may be double stranded and comprise modified nucleotides selected from 2′—O-methyl nucleotides and 2′-fluoro nucleotides. Further disclosed herein are siNA molecules comprising additional modification including a phosphorylation blocker, conjugated moiety, or 5′-stabilized end cap. The siNA molecules may reduce or inhibit the production of hydroxysteroid dehydrogenase.

[0001] This application claims the priority of U.S. Provisional Patent Application No. U.S. 63/241,940, entitled “MODIFIED SHORT INTERFERING NUCLEIC ACID (SINA) MOLECULES AND USES THEREOF”, filed Sep. 8, 2021, which is incorporated herein by reference in its entirety for all purposes.

### FIELD OF THE DISCLOSURE

[0002] Described are short interfering nucleic acid (siNA) molecules comprising modified nucleotides, compositions, and uses thereof.

### BACKGROUND

[0003] RNA interference (RNAi) is a biological response to double-stranded RNA that mediates resistance to both endogenous parasitic and exogenous pathogenic nucleic acids and regulates the expression of protein-coding genes. The short interfering nucleic acids (siNA), such as siRNA, have been developed for RNAi therapy to treat a variety of diseases. For instance, RNAi therapy has been proposed for the treatment of metabolic diseases, neurodegenerative diseases, cancer, and pathogenic infections (See e.g., Rondindone, Biotechniques, 2018, 40 (4S), doi.org/10.2144/000112163, Boudreau and Davidson, Curr Top Dev Biol, 2006, 75:73-92, Chalbatani et al., Int J Nanomedicine, 2019, 14:3111-3128, Arbuthnot, Drug News Perspect, 2010, 23 (6): 341-50, and Chernikov et. al., Front. Pharmacol., 2019, doi.org/10.3389/fphar.2019.00444, each of which are incorporated by reference in their entirety). However, major limitations of RNAi therapy are the ability to effectively deliver siRNA to target cells and the degradation of the siRNA.

[0004] Non-alcoholic fatty liver disease (NAFLD) is an emerging global health problem and a potential risk factor for type 2 diabetes, cardiovascular disease, and chronic kidney disease. Nonalcoholic steatohepatitis (NASH), an advanced form of NAFLD, is a predisposing factor for development of cirrhosis and hepatocellular carcinoma. The increasing prevalence of NASH emphasizes the need for novel therapeutic approaches. 17ß-Hydroxysteroid dehydrogenase type 13 also known as 17ß-HSD type 13 (or HSD17B13) is an enzyme that is enriched in hepatocytes, where it localizes to subcellular lipid droplets. HSD17B13 is significantly up-regulated in the liver of patients with NAFLD and NASH and enhances lipogenesis. The role of HSD17B13 in lipogenesis appears to be mediated by its retinoid dehydrogenase activity. Reduction in HSD17B13 protein levels could lead to decreased levels of ALT and AST and improved liver histology of NAFLD and NASH.

[0005] The present disclosure provides siNA molecules that target HSD17B13 to reduce or inhibit the production of a hydroxysteroid dehydrogenase. The siNA molecules comprise optimized combinations and numbers of modified nucleotides, nucleotide lengths, design (e.g., blunt ends or overhangs, internucleoside linkages, conjugates), and modification patterns that exhibit improved delivery and stability.

### SUMMARY

[0006] One aspect of the present disclosure pertains to a double-stranded short interfering nucleic acid (siNA) molecule comprising a sense strand comprising a nucleotide sequence that is at least about 60%, 65%, 70%, 75%, 80%, 85%, 90%, 95%, or 100% identical to a nucleotide sequence of any one SEQ ID NOs: 1-100, 201-230, 262-287, 314-445, 576-603 or 638; and/or an antisense strand comprising a nucleotide sequence that is at least about 60%, 65%, 70%, 75%, 80%, 85%, 90%, 95%, or 100% identical to a nucleotide sequence of any one of SEQ ID NOs: 101-200, 231-260, 288-313, 446-575, 604-637 or 639-644, wherein the siNA molecule downregulates expression of a hydroxysteroid 17-beta dehydrogenase 13 (HSD17B13) gene.

[0007] Another aspect of the present disclosure pertains to a double-stranded short interfering nucleic acid (siNA) molecule comprising a sense strand comprising a nucleotide sequence of any one SEQ ID NOs: 1-100, 201-230, 262-287, 314-445, 576-603 or 638; and/or an antisense strand comprising a nucleotide sequence of any one of SEQ ID NOs: 101-200, 231-260, 288-313, 446-575, 604-637 or 639-644, wherein the siNA molecule downregulates expression of a hydroxysteroid 17-beta dehydrogenase 13 (HSD17B13) gene.

[0008] Another aspect of the present disclosure pertains to a double-stranded short interfering nucleic acid (siNA) molecule selected from any one of siNA Duplex ID Nos. D1-D178 or MD1-MD178.

[0009] Another aspect of the present disclosure pertains to a pharmaceutical composition comprising any of the siNA molecules according to the disclosure and a pharmaceutically acceptable carrier.

[0010] Another aspect of the present disclosure pertains to a method of treating a HSD17B13-associated disease in a subject in need thereof, comprising administering to the subject an amount of any of the siNA molecules or pharmaceutical compositions according to the disclosure, thereby treating the subject. For example, the liver disease may be NAFLD, hepatocellular carcinoma (HCC), and/or NASH and/or fatty liver.

[0011] Another aspect of the present disclosure pertains to a method of treating a liver disease in a subject in need thereof, comprising administering to the subject an amount of any of the siNA molecules or pharmaceutical compositions according to the disclosure, thereby treating the subject. For example, the liver disease may be NAFLD, HCC and/or NASH and/or fatty liver.

[0012] Another aspect of the present disclosure pertains to a method of treating a liver disease in a subject in need thereof, comprising administering to the subject an amount of any of the siNA molecules or pharmaceutical compositions according to the disclosure, further comprising administering to the subject at least one additional active agent, thereby treating the subject, wherein the at least one additional active agent is a liver disease treatment agent.

[0013] Another aspect of the present disclosure pertains to a method of reducing the expression level of HSD17B13 in a patient in need thereof comprising administering to the patient an amount of any of the siRNA molecules or pharmaceutical compositions according to the disclosure, thereby reducing the expression level of HSD17B13 in the patient.

[0014] The present technology provides a short interfering nucleic acid (siNA) molecule comprising: (a) a sense strand comprising a first nucleotide sequence that is at least about 60%, 65%, 70%, 75%, 80%, 85%, 90%, 95%, or 100% identical to an RNA corresponding to a target gene, wherein the first nucleotide sequence: (i) is 15 to 30 nucleotides in length; and (ii) comprises 15 or more modified nucleotides independently selected from a 2′-O methyl nucleotide and a 2′-fluoro nucleotide, wherein at least one modified nucleotide is a 2′-O methyl nucleotide and the nucleotide at position 3, 5, 7, 8, 9, 10, 11, 12, 14, 17, and/or 19 from the 5′ end of the first nucleotide sequence is a 2′-fluoro nucleotide; and (b) an antisense strand comprising a second nucleotide sequence that is at least about 60%, 65%, 70%, 75%, 80%, 85%, 90%, 95%, or 100% complementary to the RNA corresponding to the target gene, wherein the second nucleotide sequence: (i) is 15 to 30 nucleotides in length; and (ii) comprises 15 or more modified nucleotides independently selected from a 2′-O-methyl nucleotide and a 2′-fluoro nucleotide, wherein at least one modified nucleotide is a 2′-O-methyl nucleotide and at least one modified nucleotide is a 2′-fluoro nucleotide.

[0015] The present technology also provides a molecule represented by Formula (VIII): 5′-Aₙ¹Bₙ²Aₙ³Bₙ⁴Aₙ⁵Bₙ⁶Aₙ⁷Bₙ⁸Aₙ⁹-3′ 3′-C_{q}¹A_{q}²B_{q}³A_{q}⁴B_{q}⁵A_{q}⁶B_{q}⁷A_{q}⁸B_{q}⁹A_{q}¹⁰B_{q}¹¹A_{q}¹²-5′ wherein: the top strand is a sense strand comprising a first nucleotide sequence that is at least about 60%, 65%, 70%, 75%, 80%, 85%, 90%, 95%, or 100% identical to an RNA corresponding to a target gene, wherein the first nucleotide sequence comprises 15 to 30 nucleotides; the bottom strand is an antisense strand comprising a second nucleotide sequence that is at least about 60%, 65%, 70%, 75%, 80%, 85%, 90%, 95%, or 100% complementary to the RNA corresponding to the target gene, wherein the second nucleotide sequence comprises 15 to 30 nucleotides; each A is independently a 2′-O-methyl nucleotide or a nucleotide comprising a 5′-stabilized end cap or a phosphorylation blocker; B is a 2′-fluoro nucleotide; C represents overhanging nucleotides and is a 2′-O-methyl nucleotide, deoxy nucleotide, or uracil; n¹=1-6 nucleotides in length; each n², n⁶, n⁸, q³, q⁵, q⁷, q⁹, q¹¹, and q¹² is independently 0-1 nucleotides in length; each n³ and n⁴ is independently 1-3 nucleotides in length; n⁵ is 1-10 nucleotides in length; n⁷ is 0-4 nucleotides in length; each n⁹, q¹, and q² is independently 0-2 nucleotides in length; q⁴ is 0-3 nucleotides in length; q⁶ is 0-5 nucleotides in length; q⁸ is 2-7 nucleotides in length; and q¹⁰ is 2-11 nucleotides in length.

[0016] In any embodiment, the first nucleotide sequence comprises a nucleotide sequence of any one of SEQ ID Nos: 1-100, 201-230, 262-287, 314, or 315 and/or the second nucleotide sequence comprises a nucleotide sequence of any one of SEQ ID NOs: 101-200, 231-260, or 288-313. In any embodiment, the first nucleotide sequence comprises a nucleotide sequence of any one of SEQ ID Nos: 316-445, 576-603 or 638 and/or the second nucleotide sequence comprises a nucleotide sequence of any one of SEQ ID NOs: 446-575, 604-637 or 639-644.

[0017] In any embodiment, the siNA reduces or inhibits the production of a hydroxysteroid dehydrogenase. In any embodiment, the siNA decreases expression or activity of HSD17B13.

[0018] In any embodiment, the sense and/or antisense strands disclosed herein may further include a TT sequence adjacent to the first and/or second nucleotide sequence. In any embodiment, the sense and/or antisense strands disclosed herein may further include phosphorothioate internucleoside linkage(s), mesyl phosphoroamidate internucleoside linkage(s), 5′ stabilizing end cap(s), phosphorylation blocker(s), galactosamine(s), conjugated moiety or moieties as disclosed herein, destabilizing nucleotide(s) disclosed herein, modified nucleotide(s) disclosed herein, thermally destabilizing nucleotide(s), or a combination of two or more thereof. In some embodiments, the 5′ stabilizing end cap(s), the phosphorylation blocker(s), the conjugated moiety or moieties as disclosed herein, the galactosamine(s), the destabilizing nucleotide(s) disclosed herein, the modified nucleotide(s) disclosed herein, the thermally destabilizing nucleotide(s), or a combination of two or more thereof are attached to the sense and/or antisense strand via one or more linkers independently selected from a phosphodiester linker, phosphorothioate linker, or phosphorodithioate linker.

[0019] Further disclosed herein are compositions and medicaments comprising any of the siNAs disclosed herein.

[0020] In any embodiment, the siNA molecule, compositions, and/or medicaments disclosed herein may be used in the treatment of a disease such as a liver disease. In any embodiment, the liver disease may include nonalcoholic fatty liver disease (NAFLD), hepatocellular carcinoma (HCC), or nonalcoholic steatohepatitis (NASH).

### BRIEF DESCRIPTION OF THE DRAWINGS

[0021] FIG. 1 illustrates an exemplary siNA molecule.

[0022] FIG. 2 illustrates an exemplary siNA molecule.

[0023] FIGS. 3A-3H illustrate exemplary double-stranded siNA molecules.

[0024] FIG. 4 and FIG. 5 illustrate HSD17B13 mRNA knockdown by modified siNA duplexes according to the present disclosure at 7 days post dose.

[0025] FIG. 6 illustrates HSD17B13 mRNA knockdown by modified siNA duplexes according to the present disclosure at 7 days post dose at 1.5 mpk and at 7 days post dose.

[0026] FIG. 7 illustrates HSD17B13 mRNA knockdown by modified siNA duplexes according to the present disclosure.

[0027] FIG. 8 illustrates HSD17B13 mRNA knockdown by modified siNA duplexes according to the present disclosure.

[0028] FIG. 9 illustrates HSD17B13 mRNA knockdown by modified siNA duplexes according to the present disclosure.

[0029] FIG. 10 illustrates HSD17B13 mRNA knockdown by modified siNA duplexes according to the present disclosure.

[0030] FIG. 11 illustrates western blot showing HSD17B13 protein knockdown by ds-siNA 137, ds-siNA 144, ds-siNA 148, and ds-siNA 151 at 7 days post dose.

[0031] FIG. 12 illustrates quantitation of western blot from FIG. 11.

[0032] FIG. 13 illustrates HSD17B13 mRNA knockdown by ds-siNA 137, ds-siNA 144, ds-siNA 148, and ds-siNA 151 at 7 days post dose.

[0033] FIG. 14 illustrates western blot showing HSD17B13 protein knockdown by ds-siNA 137, ds-siNA 144, ds-siNA 148, and ds-siNA 151 at 14 days post dose.

[0034] FIG. 15 illustrates quantitation of western blot from FIG. 14.

[0035] FIG. 16 illustrates HSD17B13 mRNA knockdown by ds-siNA 137, ds-siNA 144, ds-siNA 148, and ds-siNA 151 at 14 days post dose.

[0036] FIG. 17 illustrates HSD17B13 mRNA knockdown by modified siNA duplexes according to the present disclosure.

[0037] FIG. 18 illustrates HSD17B13 mRNA knockdown by modified siNA duplexes according to the present disclosure.

[0038] FIG. 19 illustrates HSD17B13 mRNA knockdown by modified siNA duplexes according to the present disclosure.

[0039] FIG. 20 illustrates HSD17B13 mRNA knockdown by modified siNA duplexes according to the present disclosure.

### DETAILED DESCRIPTION

[0040] This section presents a detailed description of the many different aspects and embodiments that are representative of the disclosure. This description is by way of several exemplary illustrations of varying detail and specificity. Other features and advantages of these embodiments are apparent from the additional descriptions provided herein, including the different examples. The provided examples illustrate different components and methodology useful in practicing various embodiments of the disclosure. The examples are not intended to limit the claimed disclosure. Based on the present disclosure, the ordinarily skilled artisan can identify and employ other components and methodology useful for practicing the present disclosure.

[0041] The present disclosure will be better understood with reference to the following definitions.

### Definitions

[0042] Unless defined otherwise, all technical and scientific terms used herein have the meaning commonly understood by a person of ordinary skill in the art to which this disclosure belongs.

[0043] The terms “a” and “an” as used herein mean “one or more” and include the plural unless the context is inappropriate.

[0044] The term “about” as used herein when referring to a measurable value (e.g., weight, time, and dose) is meant to encompass variations, such as ±10%, ±5%, ±1%, or ±0.1% of the specified value.

[0045] Except where otherwise indicated, all numbers expressing quantities of ingredients, reaction conditions, and so forth used in the specification and claims are to be understood as being modified in all instances by the term “about,” whether or not the term “about” is present in front of the number. Accordingly, unless indicated to the contrary, the numerical parameters set forth in the following specification and attached claims are approximations that may vary depending upon the desired properties sought to be obtained by the present disclosure. At the very least, and not to be considered as an attempt to limit the application of the doctrine of equivalents to the scope of the claims, each numerical parameter should be construed in light of the number of significant digits and ordinary rounding conventions.

[0046] Additionally, the disclosure of numerical ranges within this specification is considered to be a disclosure of all numerical values and ranges within that range. For example, if a range is from about 1 to about 50, it is deemed to include, for example, 1, 50, 7, 34, 46.1, 23.7, or any other value or range within the range. Moreover, as used herein, the term “at least” includes the stated number, e.g., “at least 50” includes 50.

[0047] As a general matter, compositions specifying a percentage are specifying a percentage by weight unless otherwise specified. Further, if a variable is not accompanied by a definition, then the previous definition of the variable controls.

[0048] The term “including” is used herein to mean, and is used interchangeably with, the phrase “including, but not limited to”.

[0049] As used herein, the terms “siRNA” and “siRNA molecule” and “siNA” and “siNA molecule” are used interchangeably and refer to short (or small) interfering ribonucleic acid (RNA), including chemically modified RNA, which may be single-stranded or double-stranded. As used herein, the siRNA may comprise modified nucleotides, including modifications at the sugar, nucleobase, and/or phosphodiester backbone (internucleoside linkage), and nucleoside analogs, as well as conjugates or ligands. As used herein, the term “siNA duplex” or “siRNA duplex” refers to a double-stranded (“ds”) siRNA or “dsRNA” or “ds-NA” having a sense strand and an antisense strand.

[0050] As used herein with, the term “backbone” refers to the polymeric sugar-backbone of naturally occurring nucleic acids, as well as to modified counterparts and mimics thereof, to which are covalently attached the nucleobases defining a base sequence of a particular nucleic acid molecule. In some embodiments, the backbone comprises phosphodiester internucleoside linkages (in which case it is referred to as “phosphodiester backbone”). In some embodiments, in addition to phosphodiester internucleoside linkages, the backbone comprises one or more non-phosphodiester internucleoside linkages (such as, for example, phosphorothioate internucleoside linkages), as described herein. In some embodiments, the phosphodiester internucleoside linkage connects the 3′ position of a sugar moiety (e.g., ribose) of the preceding nucleoside to the 5′ position of a sugar moiety of the subsequent nucleoside (a 3′-5′ phosphodiester linkage). In some embodiments, the phosphodiester internucleoside linkage connects the 2′ position of a sugar moiety (e.g., ribose) of the preceding nucleoside to the 5′ position a sugar moiety of the subsequent nucleoside (a 2′-5′ phosphodiester linkage). Likewise, the non-phosphodiester internucleoside linkages (e.g., phosphorothioate internucleoside linkages) may connect the 3′ position of a sugar moiety (e.g., ribose) of the preceding nucleoside to the 5′ position a sugar moiety of the subsequent nucleoside (a 3′-5′ phosphorothioate linkage) or the 2′ position of a sugar moiety (e.g., ribose) of the preceding nucleoside to the 5′ position a sugar moiety of the subsequent nucleoside (a 2′-5′ phosphorothioate linkage). In some embodiments, siRNAs comprise exclusively 3′-5′ internucleoside linkages. In some embodiments, siRNAs comprise exclusively 2′-5′ internucleoside linkages. In some embodiments, siRNAs comprise a mixture of 3′-5′ internucleoside linkages and 2′-5′ internucleoside linkages.

[0051] As used herein, the term “antisense strand” or “guide strand” refers to the strand of a siRNA molecule which includes a region that is substantially complementary to a target sequence, e.g., a HSD17B13 mRNA.

[0052] As used herein, the term “sense strand” or “passenger strand” refers to the strand of a siRNA molecule that includes a region that is substantially complementary to a region of the antisense strand as that term is defined herein.

[0053] As used herein, the term “modified nucleotide” refers to a nucleotide having, independently, modifications at the sugar, nucleobase, and/or phosphodiester backbone (internucleoside linkage), and nucleoside analogs. Thus, the term modified nucleotide encompasses substitutions, additions, or removal of, e.g., a functional group or atom, to internucleoside linkages, sugar moieties, or nucleobases. The modifications suitable for use in the siRNAs of the disclosure include all types of modifications disclosed herein or known in the art. Any such modifications, as used in a siNA or siRNA molecule, are encompassed by “siRNA” and “siRNA molecule” and “siRNA duplex” and “siNA” and “siNA molecule” and “siNA duplex” for the purposes of this specification and claims. It will also be understood that the term “nucleotide” can also refer to a modified nucleotide, as further detailed herein.

[0054] As used herein, the term “nucleobase” refers to naturally-occurring nucleobases and their analogues. Examples of naturally-occurring nucleobases or their analogues include, but are not limited to, thymine, uracil, adenine, cytosine, guanine, aryl, heteroaryl, and an analogue or derivative thereof.

[0055] As used herein, the term “nucleotide overhang” or “overhang” refers to at least one unpaired nucleotide that protrudes from the duplex structure of a double-stranded RNA (e.g., siRNA duplex or dsRNA). For example, when a 3′ end of one strand of a dsRNA extends beyond the 5′ end of the other strand, or vice versa, there is a nucleotide overhang. The overhang(s) can be on the sense strand, the antisense strand or any combination thereof. Furthermore, the nucleotide(s) of an overhang can be present on the 5′ end, 3′ end or both ends of an antisense and/or sense strand of a dsRNA and can comprise modified nucleotides. Generally, if any nucleotide overhangs, as defined herein, are present, the sequence of such overhangs is not considered in determining the degree of complementarity between two sequences and such overhangs shall not be regarded as mismatches with regard to the determination of complementarity. By way of example, a sense strand of 21 nucleotides in length and an antisense strand of 21 nucleotides in length that hybridizes to form a 19 base pair duplex region with a 2 nucleotide overhang at the 3′ end of each strand would be considered to be fully complementary as the term is used herein.

[0056] As used herein, the term “blunt end” refers to an end of a dsRNA with no unpaired nucleotides, i.e., no nucleotide overhang. In some embodiments, a blunt end can be present on one or both ends of a dsRNA.

[0057] The terms “complementary,” “fully complementary” and “substantially complementary” herein can be used with respect to the base pairing between the sense strand and the antisense strand of a duplex siRNA or dsRNA, or between the antisense strand of a siRNA and a target sequence, as will be understood from the context of their use. As used herein, a first sequence is “complementary” to a second sequence if a polynucleotide comprising the first sequence can hybridize to a polynucleotide comprising the second sequence to form a duplex region under certain conditions, such as physiological conditions. Other such conditions can include moderate or stringent hybridization conditions, which are known to those of ordinary skill in the art. A first sequence is considered to be fully complementary (100% complementary) to a second sequence if a polynucleotide comprising the first sequence base pairs with a polynucleotide comprising the second sequence over the entire length of one or both nucleotide sequences without any mismatches. In some embodiments, a sequence is “substantially complementary” to a target sequence if the sequence is at least about 80%, 85%, 90%, 95%, 96%, 97%, 98%, 99% or 100% complementary to a target sequence. Percent complementarity can be calculated, for example, by dividing the number of bases in a first sequence that are complementary to bases at corresponding positions in a second or target sequence by the total length of the first sequence. Such calculations are well within the ability of those ordinarily skilled in the art. A sequence may also be said to be substantially complementary to another sequence if there are no more than 5, 4, 3, 2, or 1 mismatches over a 30 base pair duplex region, for example, when the two sequences are hybridized. “Complementary” sequences, as used herein, can also include, or be formed entirely from, non-Watson-Crick base pairs and/or base pairs formed from modified nucleotides, in so far as the above requirements with respect to their ability to hybridize are fulfilled.

[0058] The use of percent identity (i.e., “identical”) is a common way of defining the number of differences in the nucleobases between two nucleic acid sequences. For example, where a first sequence is ACGT, a second sequence of ACGA would be considered a “non-identical” sequence with one difference. Percent identity may be calculated over the entire length of a sequence, or over a portion of the sequence. Percent identity may be calculated according to the number of nucleobases that have identical base pairing corresponding to the sequence to which it is being compared. The non-identical nucleobases may be adjacent to each other, dispersed throughout the sequence, or both. Such calculations are well within the ability of those ordinarily skilled in the art.

[0059] As used herein, “missense mutation” refers to when a change in a single base pair results in a substitution of a different amino acid in the resulting protein.

[0060] As used herein, the term “effective amount” or “therapeutically effective amount” refers to the amount of a siRNA of the present disclosure sufficient to effect beneficial or desired results, such as for example, the amount that will elicit the biological or medical response of a tissue, system, animal, or human that is being sought by a researcher, veterinarian, medical doctor, or other clinician. A therapeutically effective amount can be administered in one or more administrations, applications, or dosages and is not intended to be limited to a particular formulation or administration route. In some embodiments, “therapeutically effective amount” means an amount that alleviates at least one clinical symptom in a human patient, e.g., at least one symptom of a HSD17B13-associated disease or a liver disease.

[0061] As used herein, the terms “patient” and “subject” refer to organisms who use the siRNA molecules of the disclosure for the prevention or treatment of a medical condition, including in the methods of the present disclosure. Such organisms are preferably mammals, and more preferably humans. As used herein, a subject “in need” of treatment of an existing condition or of prophylactic treatment encompasses both a determination of need by a medical professional as well as the desire of a patient for such treatment. Administering of the compound (e.g., a siNA or siRNA of the present disclosure) to the subject includes both self-administration and administration to the patient by another.

[0062] As used herein, the term “active agent” or “active ingredient” or “therapeutic agent” refers to an ingredient with a pharmacological effect, such as a therapeutic effect, at a relevant dose. This includes siRNA molecules according to the disclosure.

[0063] As used herein, a “liver disease treatment agent” is an active agent which can be used to treat liver disease, either alone or in combination with another active agent, and is other than the siRNA of the present disclosure.

[0064] As used herein, the term “pharmaceutical composition” refers to the combination of at least one active agent with a carrier, inert or active, making the composition especially suitable for diagnostic or therapeutic use in vivo or ex vivo. In some embodiments, the term “pharmaceutical composition” means a composition comprising a siRNA molecule as described herein and at least one additional component selected from pharmaceutically acceptable carriers, diluents, adjuvants, excipients, or vehicles, such as preserving agents, fillers, disintegrating agents, wetting agents, emulsifying agents, suspending agents, sweetening agents, flavoring agents, perfuming agents, antibacterial agents, antifungal agents, lubricating agents and dispensing agents, depending on the mode of administration and dosage form used.

[0065] As used herein, the term “pharmaceutically acceptable carrier” refers to any pharmaceutical carrier, diluent, adjuvant, excipient, or vehicle, including those described herein, for example, solvents, buffers, solutions (e.g., a phosphate buffered saline solution), water, emulsions (e.g., such as an oil/water or water/oil emulsions), various types of wetting agents, stabilizers, preservatives, antibacterial and antifungal agents, dispersion media, coatings, isotonic and absorption delaying agents and the like acceptable for use in formulating pharmaceuticals, including, for example, pharmaceuticals suitable for administration to humans. For examples of carriers, see, for example, Martin, Remington's Pharmaceutical Sciences, 15th Ed., Mack Publ. Co., Easton, PA [1975].

[0066] As used herein, the terms “treat”, “treating”, and “treatment” include any effect, e.g., lessening, reducing, modulating, ameliorating or eliminating, that results in the improvement of the condition, disease, disorder, and the like; or of one or more symptoms associated with the condition, disease, or disorder; or of the cause(s) of the condition, disease, or disorder. For example, with respect to HSD17B13-associated disease, the terms “treat”, “treating”, and “treatment” include, but are not limited to, alleviation or amelioration of one or more symptoms associated with HSD17B13 gene expression and/or HSD17B13 protein production, e.g., fatty liver (steatosis), nonalcoholic steatohepatitis (NASH), cirrhosis of the liver, accumulation of fat in the liver, inflammation of the liver, hepatocellular necrosis, liver fibrosis, obesity, hepatocellular carcinoma (HCC) or nonalcoholic fatty liver disease (NAFLD). “Treatment” can also mean prolonging survival as compared to expected survival in the absence of treatment.

[0067] As used herein, the terms “alleviate” and “alleviating” refer to reducing the severity of the condition and/or a symptom thereof, such as reducing the severity by, for example, at least 10%, 20%, 30%, 40%, 50%, 60%, 70%, 80%, 90%, or 95%.

[0068] As used herein, the term “downregulate” or “downregulating” is used interchangeably with “reducing”, “inhibiting”, or “suppressing” or other similar terms, and includes any level of downregulation.

[0069] As used herein, the term “HSD17B13 gene” refers to the hydroxysteroid 17-beta dehydrogenase 13 gene and includes variants thereof. HSD17B13 has a sequence shown in the nucleotide sequence of SEQ ID NO: 261, which corresponds to the nucleotide sequence of the coding sequence of GenBank Accession No. NM_178135.5 (nucleotides 42 to 944), which is incorporated by reference in its entirety. Additional examples of HSD17B13 gene sequences, including for other mammalian genes, are readily available using public databases, including, for example, NCBI RefSeq, GenBank, UniProt, and OMIM.

[0070] Throughout the description, where compositions are described as having, including, or comprising specific components, or where processes and methods are described as having, including, or comprising specific steps, it is contemplated that, additionally, there are compositions of the present disclosure that consist essentially of, or consist of, the recited components, and that there are processes and methods according to the present disclosure that consist essentially of, or consist of, the recited processing steps.

[0071] Unless defined otherwise, all technical and scientific terms used herein have the meaning commonly understood by a person skilled in the art to which this disclosure belongs. The following references provide one of skill with a general definition of many of the terms used in this invention: Singleton et al., Dictionary of Microbiology and Molecular Biology (2nd ed. 1994); The Cambridge Dictionary of Science and Technology (Walker ed., 1988); The Glossary of Genetics, 5th Ed., R. Rieger et al., (eds.), Springer Verlag (1991); and Hale & Marham, The Harper Collins Dictionary of Biology (1991). As used herein, the following terms have the meanings ascribed to them below, unless specified otherwise. The terminology used herein is for the purpose of describing particular embodiments only and is not intended to be limiting of the disclosure.

siRNA Molecules

[0072] Disclosed herein are double-stranded short (or small) interfering RNA (siRNA) molecules that specifically downregulate expression of a hydroxysteroid 17-beta dehydrogenase 13 (HDS17B13) gene.

[0073] In some embodiments, the double-stranded siRNA molecule comprises (a) a sense strand comprising a nucleotide sequence that is at least about 60%, 65%, 70%, 75%, 80%, 85%, 90%, 95%, or 100% identical to the nucleotide sequence of any one of SEQ ID NOs: 1-100, 201-230, 262-287, 314-445, 576-603 or 638; and/or (b) an antisense strand comprising a nucleotide sequence that is at least about 60%, 65%, 70%, 75%, 80%, 85%, 90%, 95%, or 100% identical to the nucleotide sequence of any one of SEQ ID NOs: 101-200, 231-260, 288-313, 446-575, 604-637 or 639-644.

[0074] In some embodiments, the double-stranded siRNA molecule comprises (a) a sense strand comprising a nucleotide sequence of any one SEQ ID NOs: 1-100, 201-230, 262-287, 314-445, 576-603 or 638; and/or (b) an antisense strand comprising a nucleotide sequence of any one of SEQ ID NOs: 101-200, 231-260, 288-313, 446-575, 604-637 or 639-644.

[0075] In some embodiments, the double-stranded siRNA molecule comprises a sense strand comprising a nucleotide sequence of any one of SEQ ID NOs: 1-100 or 201-230. In some embodiments, the siRNA molecule comprises an antisense strand comprising a nucleotide sequence of any one of SEQ ID NOs: 101-200 or 231-260. In some embodiments, the siRNA molecule comprises (a) a sense strand comprising a nucleotide sequence of any one of SEQ ID NOs: 1-100 or 201-230 and (b) an antisense strand comprising a nucleotide sequence of any one of SEQ ID NOs: 101-200 or 231-260.

[0076] In some embodiments, the double-stranded siRNA molecule comprises a sense strand comprising a nucleotide sequence of any one of SEQ ID NOs: 316-445. In some embodiments, the siRNA molecule comprises an antisense strand comprising a nucleotide sequence of any one of SEQ ID NOs: 446-575. In some embodiments, the siRNA molecule comprises (a) a sense strand comprising a nucleotide sequence of any one of SEQ ID NOs: 316-445 and (b) an antisense strand comprising a nucleotide sequence of any one of SEQ ID NOs: 446-575.

[0077] In some embodiments, the double-stranded siRNA molecule comprises a sense strand comprising a nucleotide sequence of any one of SEQ ID NOs: 262-287, 314 or 315. In some embodiments, the siRNA molecule comprises an antisense strand comprising a nucleotide sequence of any one of SEQ ID NOs: 288-313. In some embodiments, the siRNA molecule comprises (a) a sense strand comprising a nucleotide sequence of any one of SEQ ID NOs: 262-287, 314 or 315 and (b) an antisense strand comprising a nucleotide sequence of any one of SEQ ID NOs: 288-313.

[0078] In some embodiments, the double-stranded siRNA molecule comprises a sense strand comprising a nucleotide sequence of any one of SEQ ID NOs: 576-603 or 638. In some embodiments, the siRNA molecule comprises an antisense strand comprising a nucleotide sequence of any one of SEQ ID NOs: 604-637 or 639-644. In some embodiments, the siRNA molecule comprises (a) a sense strand comprising a nucleotide sequence of any one of SEQ ID NOs: 576-603 or 638 and (b) an antisense strand comprising a nucleotide sequence of any one of SEQ ID NOs: 604-637 or 639-644.

[0079] In some embodiments, the double-stranded siRNA molecule comprises (a) a sense strand comprising at least about 15, 16, 17, 18, 19, 20, or 21 consecutive nucleotides of the nucleotide sequence of any one SEQ ID NOs: 1-100, 201-230, 262-287, 314-445, 576-603 or 638; and/or (b) an antisense strand comprising at least about 15, 16, 17, 18, 19, 20, 21, 22, or 23 consecutive nucleotides of the nucleotide sequence of any one of SEQ ID NOs: 101-200, 231-260, 288-313, 446-575, 604-637 or 639-644

[0080] In some embodiments, the double-stranded siRNA molecule comprises (a) a sense strand comprising a nucleotide sequence having at least about 15, 16, 17, 18, 19, 20, or 21 consecutive nucleotides of the nucleotide sequence of any one of SEQ ID NOs: 1-100, 201-230, 262-287, 314-445, 576-603 or 638; and/or (b) an antisense strand comprising a nucleotide sequence having at least about 15, 16, 17, 18, 19, 20, 21, 22, or 23 consecutive nucleotides of the nucleotide sequence of any one of SEQ ID NOs: 101-200, 231-260, 288-313, 446-575, 604-637 or 639-644.

[0081] In some embodiments, at least one end of the double-stranded siRNA molecule is a blunt end. In some embodiments, both ends of the double-stranded siRNA molecule are blunt ends. In some embodiments, one end of the double-stranded siRNA molecule comprises a blunt end and one end of the double-stranded siRNA molecule comprises an overhang.

[0082] In some embodiments, at least one end of the siRNA molecule comprises an overhang, wherein the overhang comprises at least one unpaired nucleotide. In some embodiments, at least one end of the siRNA molecule comprises an overhang, wherein the overhang comprises at least two unpaired nucleotides. In some embodiments, both ends of the siRNA molecule comprise an overhang, wherein the overhang comprises at least one unpaired nucleotide. In some embodiments, both ends of the siRNA molecule comprise an overhang, wherein the overhang comprises at least two unpaired nucleotides. In some embodiments, the siRNA molecule comprises an overhang of two unpaired nucleotides at the 3′ end of the sense strand. In some embodiments, the siRNA molecule comprises an overhang of two unpaired nucleotides at the 3′ end of the antisense strand. In some embodiments, the siRNA molecule comprises an overhang of two unpaired nucleotides at the 3′ end of the sense strand and the 3′ end of the antisense strand.

[0083] In some embodiments, the double stranded siRNA molecule is selected from any one of siNA Duplex ID Nos. ds-siNA D1-D178 or mds-siNA MD1-MD178. In some embodiments, the double stranded siRNA molecule is selected from any one of siRNA Duplex ID Nos. ds-siNA D1-D178. In some embodiments, the double stranded siRNA molecule is selected from any one of siRNA Duplex ID Nos. mds-siNA MD1-MD178.

[0084] In some embodiments, the double stranded siRNA molecule is selected from any one of the siRNA Duplexes of Table 8 or Table 9 or Table 10 or Table 11 or Table 12. In some embodiments, the double stranded siRNA molecule is selected from any one of the siRNA Duplexes of Table 8. In some embodiments, the double stranded siRNA molecule is selected from any one of the siRNA Duplexes of Table 9. In some embodiments, the double stranded siRNA molecule is selected from any one of the siRNA Duplexes of Table 10. In some embodiments, the double stranded siRNA molecule is selected from any one of the siRNA Duplexes of Table 11. In some embodiments, the double stranded siRNA molecule is selected from any one of the siRNA Duplexes of Table 12.

[0085] In some embodiments, the double stranded siRNA molecule is about 17 to about 29 base pairs in length, or from 19-23 base pairs, or from 19-21 base pairs, one strand of which is complementary to a target mRNA, that when added to a cell having the target mRNA, or produced in the cell in vivo, causes degradation of the target mRNA.

[0086] In some embodiments, the siRNA molecules of the disclosure comprise a nucleotide sequence that is complementary to a nucleotide sequence of a target gene. In some embodiments, the siRNA molecule of the disclosure interacts with a nucleotide sequence of a target gene in a manner that causes inhibition of expression of the target gene.

[0087] The siRNA molecules can be obtained using any one of a number of techniques known to those of ordinary skill in the art. In some embodiments, the siRNA molecules may be synthesized as two separate, complementary nucleic acid molecules, or as a single nucleic acid molecule with two complementary regions. For example, the siRNAs of the disclosure may be chemically synthesized using appropriately protected ribonucleoside phosphoramidites and a conventional RNA synthesizer or other well-known methods. In addition, the siRNAs may be produced by a commercial supplier, such as, for example, Dharmacon/Horizon (Lafayette, Colo., USA), Glen Research (Sterling, Va., USA), ChemGenes (Ashland, Mass., USA) and Cruachem (Glasgow, UK). In some embodiments, the siRNA molecules may be encoded by a plasmid.

### Sense Strand

[0088] Any of the siRNA molecules described herein may comprise a sense strand. In some embodiments, the sense strand comprises between about 15 to about 50 nucleotides. In some embodiments, the sense strand comprises between about 15 to about 45 nucleotides. In some embodiments, the sense strand comprises between about 15 to about 40 nucleotides. In some embodiments, the sense strand comprises between about 15 to about 35 nucleotides. In some embodiments, the sense strand comprises between about 15 to about 30 nucleotides. In some embodiments, the sense strand comprises between about 15 to about 25 nucleotides. In some embodiments, the sense strand comprises between about 17 to about 23 nucleotides. In some embodiments, the sense strand comprises between about 17 to about 22 nucleotides. In some embodiments, the sense strand comprises between about 17 to about 21 nucleotides. In some embodiments, the sense strand comprises between about 18 to about 23 nucleotides. In some embodiments, the sense strand comprises between about 18 to about 22 nucleotides. In some embodiments, the sense strand comprises between about 18 to about 21 nucleotides. In some embodiments, the sense strand comprises between about 19 to about 23 nucleotides. In some embodiments, the sense strand comprises between about 19 to about 22 nucleotides. In some embodiments, the sense strand comprises between about 19 to about 21 nucleotides.

[0089] In some embodiments, the sense strand comprises at least about 15, 16, 17, 18, 19, 20, 21, 22, 23, 24, 25, 26, 27, 28, 29, or 30 or more nucleotides. In some embodiments, the sense strand comprises at least about 15 nucleotides. In some embodiments, the sense strand comprises at least about 16 nucleotides. In some embodiments, the sense strand comprises at least about 17 nucleotides. In some embodiments, the sense strand comprises at least about 18 nucleotides. In some embodiments, the sense strand comprises at least about 19 nucleotides. In some embodiments, the sense strand comprises at least about 20 nucleotides. In some embodiments, the sense strand comprises at least about 21 nucleotides. In some embodiments, the sense strand comprises at least about 22 nucleotides. In some embodiments, the sense strand comprises at least about 23 nucleotides.

[0090] In some embodiments, the sense strand comprises less than about 50, 45, 40, 35, 30, 29, 28, 27, 26, 25, 24, 23, 22, 21, 20, or 19 or fewer nucleotides. In some embodiments, the sense strand comprises less than about 30 nucleotides. In some embodiments, the sense strand comprises less than about 25 nucleotides. In some embodiments, the sense strand comprises less than about 24 nucleotides. In some embodiments, the sense strand comprises less than about 23 nucleotides. In some embodiments, the sense strand comprises less than about 22 nucleotides. In some embodiments, the sense strand comprises less than about 21 nucleotides. In some embodiments, the sense strand comprises less than about 20 nucleotides. In some embodiments, the sense strand comprises less than about 19 nucleotides.

[0091] In some embodiments, the sense strand comprises a sequence that is at least about 60%, 65%, 70%, 75%, 80%, 85%, 90%, 95%, or 100% identical to a fragment of the HSD17B13 gene across the entire length of the sense strand. In some embodiments, the sense strand comprises a sequence that is at least about 70% identical to a fragment of the HSD17B13 gene across the entire length of the sense strand. In some embodiments, the sense strand comprises a sequence that is at least about 75% identical to a fragment of the HSD17B13 gene across the entire length of the sense strand. In some embodiments, the sense strand comprises a sequence that is at least about 80% identical to a fragment of the HSD17B13 gene across the entire length of the sense strand. In some embodiments, the sense strand comprises a sequence that is at least about 85% identical to a fragment of the HSD17B13 gene across the entire length of the sense strand. In some embodiments, the sense strand comprises a sequence that is at least about 90% identical to a fragment of the HSD17B13 gene across the entire length of the sense strand. In some embodiments, the sense strand comprises a sequence that is at least about 95% identical to a fragment of the HSD17B13 gene across the entire length of the sense strand. In some embodiments, the sense strand comprises a sequence that is about 100% identical to a fragment of the HSD17B13 gene across the entire length of the sense strand. In some embodiments, the fragment of the HSD17B13 gene consists of about 15, 16, 17, 18, 19, 20, 21, 22, 23, 24, 25, 26, 27, 28, 29, or 30 consecutive nucleotides of the HSD17B13 gene. In some embodiments, the fragment of the HSD17B13 gene consists of about 15 consecutive nucleotides of the HSD17B13 gene. In some embodiments, the fragment of the HSD17B13 gene consists of about 16 consecutive nucleotides of the HSD17B13 gene. In some embodiments, the fragment of the HSD17B13 gene consists of about 17 consecutive nucleotides of the HSD17B13 gene. In some embodiments, the fragment of the HSD17B13 gene consists of about 18 consecutive nucleotides of the HSD17B13 gene. In some embodiments, the fragment of the HSD17B13 gene consists of about 19 consecutive nucleotides of the HSD17B13 gene. In some embodiments, the fragment of the HSD17B13 gene consists of about 20 consecutive nucleotides of the HSD17B13 gene. In some embodiments, the fragment of the HSD17B13 gene consists of about 21 consecutive nucleotides of the HSD17B13 gene. In some embodiments, the fragment of the HSD17B13 gene consists of about 22 consecutive nucleotides of the HSD17B13 gene. In some embodiments, the fragment of the HSD17B13 gene consists of about 23 consecutive nucleotides of the HSD17B13 gene.

[0092] In some embodiments, the sense strand comprises a sequence having between about 15 to about 50 consecutive nucleotides of a fragment of the HSD17B13 gene. In some embodiments, the sense strand comprises a sequence having between about 15 to about 45 consecutive nucleotides of a fragment of the HSD17B13 gene. In some embodiments, the sense strand comprises a sequence having between about 15 to about 40 consecutive nucleotides of a fragment of the HSD17B13 gene. In some embodiments, the sense strand comprises a sequence having between about 15 to about 35 consecutive nucleotides of a fragment of the HSD17B13 gene. In some embodiments, the sense strand comprises a sequence having between about 15 to about 30 consecutive nucleotides of a fragment of the HSD17B13 gene. In some embodiments, the sense strand comprises a sequence having between about 15 to about 25 consecutive nucleotides of a fragment of the HSD17B13 gene. In some embodiments, the sense strand comprises between about 17 to about 23 consecutive nucleotides of a fragment of the HSD17B13 gene. In some embodiments, the sense strand comprises between about 17 to about 22 consecutive nucleotides of a fragment of the HSD17B13 gene. In some embodiments, the sense strand comprises between about 17 to about 21 consecutive nucleotides of a fragment of the HSD17B13 gene. In some embodiments, the sense strand comprises between about 18 to about 23 consecutive nucleotides of a fragment of the HSD17B13 gene. In some embodiments, the sense strand comprises between about 18 to about 22 consecutive nucleotides of a fragment of the HSD17B13 gene. In some embodiments, the sense strand comprises between about 18 to about 21 consecutive nucleotides of a fragment of the HSD17B13 gene. In some embodiments, the sense strand comprises between about 19 to about 23 consecutive nucleotides of a fragment of the HSD17B13 gene. In some embodiments, the sense strand comprises between about 19 to about 22 consecutive nucleotides of a fragment of the HSD17B13 gene. In some embodiments, the sense strand comprises between about 19 to about 21 consecutive nucleotides of a fragment of the HSD17B13 gene. In some embodiments, the fragment of the HSD17B13 gene consists of about 15, 16, 17, 18, 19, 20, 21, 22, 23, 24, 25, 26, 27, 28, 29, or 30 consecutive nucleotides of the HSD17B13 gene. In some embodiments, the fragment of the HSD17B13 gene consists of about 15 consecutive nucleotides of the HSD17B13 gene. In some embodiments, the fragment of the HSD17B13 gene consists of about 16 consecutive nucleotides of the HSD17B13 gene. In some embodiments, the fragment of the HSD17B13 gene consists of about 17 consecutive nucleotides of the HSD17B13 gene. In some embodiments, the fragment of the HSD17B13 gene consists of about 18 consecutive nucleotides of the HSD17B13 gene. In some embodiments, the fragment of the HSD17B13 gene consists of about 19 consecutive nucleotides of the HSD17B13 gene. In some embodiments, the fragment of the HSD17B13 gene consists of about 20 consecutive nucleotides of the HSD17B13 gene. In some embodiments, the fragment of the HSD17B13 gene consists of about 21 consecutive nucleotides of the HSD17B13 gene. In some embodiments, the fragment of the HSD17B13 gene consists of about 22 consecutive nucleotides of the HSD17B13 gene. In some embodiments, the fragment of the HSD17B13 gene consists of about 23 consecutive nucleotides of the HSD17B13 gene.

[0093] In some embodiments, the sense strand comprises a sequence having at least about 15, 16, 17, 18, 19, 20, 21, 22, 23, 24, 25, 26, 27, 28, 29, or 30 or more consecutive nucleotides of a fragment of the HSD17B13 gene. In some embodiments, the sense strand comprises a sequence having at least about 15 consecutive nucleotides of a fragment of the HSD17B13 gene. In some embodiments, the sense strand comprises a sequence having at least about 16 consecutive nucleotides of a fragment of the HSD17B13 gene. In some embodiments, the sense strand comprises a sequence having at least about 17 consecutive nucleotides of a fragment of the HSD17B13 gene. In some embodiments, the sense strand comprises a sequence having at least about 18 consecutive nucleotides of a fragment of the HSD17B13 gene. In some embodiments, the sense strand comprises a sequence having at least about 19 consecutive nucleotides of a fragment of the HSD17B13 gene. In some embodiments, the sense strand comprises a sequence having at least about 20 consecutive nucleotides of a fragment of the HSD17B13 gene. In some embodiments, the sense strand comprises a sequence having at least about 21 consecutive nucleotides of a fragment of the HSD17B13 gene. In some embodiments, the sense strand comprises a sequence having at least about 22 consecutive nucleotides of a fragment of the HSD17B13 gene. In some embodiments, the sense strand comprises a sequence having at least about 23 consecutive nucleotides of a fragment of the HSD17B13 gene. In some embodiments, the fragment of the HSD17B13 gene consists of about 15, 16, 17, 18, 19, 20, 21, 22, 23, 24, 25, 26, 27, 28, 29, or 30 consecutive nucleotides of the HSD17B13 gene. In some embodiments, the fragment of the HSD17B13 gene consists of about 15 consecutive nucleotides of the HSD17B13 gene. In some embodiments, the fragment of the HSD17B13 gene consists of about 16 consecutive nucleotides of the HSD17B13 gene. In some embodiments, the fragment of the HSD17B13 gene consists of about 17 consecutive nucleotides of the HSD17B13 gene. In some embodiments, the fragment of the HSD17B13 gene consists of about 18 consecutive nucleotides of the HSD17B13 gene. In some embodiments, the fragment of the HSD17B13 gene consists of about 19 consecutive nucleotides of the HSD17B13 gene. In some embodiments, the fragment of the HSD17B13 gene consists of about 20 consecutive nucleotides of the HSD17B13 gene. In some embodiments, the fragment of the HSD17B13 gene consists of about 21 consecutive nucleotides of the HSD17B13 gene. In some embodiments, the fragment of the HSD17B13 gene consists of about 22 consecutive nucleotides of the HSD17B13 gene. In some embodiments, the fragment of the HSD17B13 gene consists of about 23 consecutive nucleotides of the HSD17B13 gene.

[0094] In some embodiments, the sense strand comprises a sequence having less than about 50, 45, 40, 35, 30, 29, 28, 27, 26, 25, 24, 23, 22, 21, 20, or 19 or fewer consecutive nucleotides of a fragment of the HSD17B13 gene. In some embodiments, the sense strand comprises a sequence having less than about 35 consecutive nucleotides of a fragment of the HSD17B13 gene. In some embodiments, the sense strand comprises a sequence having less than about 30 consecutive nucleotides of a fragment of the HSD17B13 gene. In some embodiments, the sense strand comprises a sequence having less than about 25 consecutive nucleotides of a fragment of the HSD17B13 gene. In some embodiments, the sense strand comprises a sequence having less than about 24 consecutive nucleotides of a fragment of the HSD17B13 gene. In some embodiments, the sense strand comprises a sequence having less than about 23 consecutive nucleotides of a fragment of the HSD17B13 gene. In some embodiments, the sense strand comprises a sequence having less than about 22 consecutive nucleotides of a fragment of the HSD17B13 gene. In some embodiments, the sense strand comprises a sequence having less than about 21 consecutive nucleotides of a fragment of the HSD17B13 gene. In some embodiments, the sense strand comprises a sequence having less than about 20 consecutive nucleotides of a fragment of the HSD17B13 gene. In some embodiments, the sense strand comprises a sequence having less than about 19 consecutive nucleotides of a fragment of the HSD17B13 gene. In some embodiments, the fragment of the HSD17B13 gene consists of about 15, 16, 17, 18, 19, 20, 21, 22, 23, 24, 25, 26, 27, 28, 29, or 30 consecutive nucleotides of the HSD17B13 gene. In some embodiments, the fragment of the HSD17B13 gene consists of about 15 consecutive nucleotides of the HSD17B13 gene. In some embodiments, the fragment of the HSD17B13 gene consists of about 16 consecutive nucleotides of the HSD17B13 gene. In some embodiments, the fragment of the HSD17B13 gene consists of about 17 consecutive nucleotides of the HSD17B13 gene. In some embodiments, the fragment of the HSD17B13 gene consists of about 18 consecutive nucleotides of the HSD17B13 gene. In some embodiments, the fragment of the HSD17B13 gene consists of about 19 consecutive nucleotides of the HSD17B13 gene. In some embodiments, the fragment of the HSD17B13 gene consists of about 20 consecutive nucleotides of the HSD17B13 gene. In some embodiments, the fragment of the HSD17B13 gene consists of about 21 consecutive nucleotides of the HSD17B13 gene. In some embodiments, the fragment of the HSD17B13 gene consists of about 22 consecutive nucleotides of the HSD17B13 gene. In some embodiments, the fragment of the HSD17B13 gene consists of about 23 consecutive nucleotides of the HSD17B13 gene.

[0095] In some embodiments, the sense strand comprises a sequence having less than or equal to 5, 4, 3, 2, or 1 nucleobase differences to a fragment of the HSD17B13 gene across the entire length of the sense strand, wherein the fragment of the HSD17B13 gene consists of about 15, 16, 17, 18, 19, 20, 21, 22, 23, 24, 25, 26, 27, 28, 29, or 30 consecutive nucleotides of the HSD17B13 gene. In some embodiments, the sense strand comprises a sequence having less than or equal to 5 nucleobase differences to a fragment of the HSD17B13 gene across the entire length of the sense strand, wherein the fragment of the HSD17B13 gene consists of about 15, 16, 17, 18, 19, 20, 21, 22, 23, 24, 25, 26, 27, 28, 29, or 30 consecutive nucleotides of the HSD17B13 gene. In some embodiments, the sense strand comprises a sequence having less than or equal to 4 nucleobase differences to a fragment of the HSD17B13 gene across the entire length of the sense strand, wherein the fragment of the HSD17B13 gene consists of about 15, 16, 17, 18, 19, 20, 21, 22, 23, 24, 25, 26, 27, 28, 29, or 30 consecutive nucleotides of the HSD17B13 gene. In some embodiments, the sense strand comprises a sequence having less than or equal to 3 nucleobase differences to a fragment of the HSD17B13 gene across the entire length of the sense strand, wherein the fragment of the HSD17B13 gene consists of about 15, 16, 17, 18, 19, 20, 21, 22, 23, 24, 25, 26, 27, 28, 29, or 30 consecutive nucleotides of the HSD17B13 gene. In some embodiments, the sense strand comprises a sequence having less than or equal to 2 nucleobase differences to a fragment of the HSD17B13 gene across the entire length of the sense strand, wherein the fragment of the HSD17B13 gene consists of about 15, 16, 17, 18, 19, 20, 21, 22, 23, 24, 25, 26, 27, 28, 29, or 30 consecutive nucleotides of the HSD17B13 gene. In some embodiments, the sense strand comprises a sequence having less than or equal to 1 nucleobase differences to a fragment of the HSD17B13 gene across the entire length of the sense strand, wherein the fragment of the HSD17B13 gene consists of about 15, 16, 17, 18, 19, 20, 21, 22, 23, 24, 25, 26, 27, 28, 29, or 30 consecutive nucleotides of the HSD17B13 gene. In some embodiments, the sense strand comprises a sequence having 0 nucleobase differences to a fragment of the HSD17B13 gene across the entire length of the sense strand, wherein the fragment of the HSD17B13 gene consists of about 15, 16, 17, 18, 19, 20, 21, 22, 23, 24, 25, 26, 27, 28, 29, or 30 consecutive nucleotides of the HSD17B13 gene. In some embodiments, the fragment of the HSD17B13 gene consists of about 15 consecutive nucleotides of the HSD17B13 gene. In some embodiments, the fragment of the HSD17B13 gene consists of about 16 consecutive nucleotides of the HSD17B13 gene. In some embodiments, the fragment of the HSD17B13 gene consists of about 17 consecutive nucleotides of the HSD17B13 gene. In some embodiments, the fragment of the HSD17B13 gene consists of about 18 consecutive nucleotides of the HSD17B13 gene. In some embodiments, the fragment of the HSD17B13 gene consists of about 19 consecutive nucleotides of the HSD17B13 gene. In some embodiments, the fragment of the HSD17B13 gene consists of about 20 consecutive nucleotides of the HSD17B13 gene. In some embodiments, the fragment of the HSD17B13 gene consists of about 21 consecutive nucleotides of the HSD17B13 gene. In some embodiments, the fragment of the HSD17B13 gene consists of about 22 consecutive nucleotides of the HSD17B13 gene. In some embodiments, the fragment of the HSD17B13 gene consists of about 23 consecutive nucleotides of the HSD17B13 gene.

[0096] In some embodiments, the sense strand comprises a nucleotide sequence of any one of SEQ ID NOs: 1-100, 201-230, 262-287, 314-445, 576-603 or 638. In some embodiments, the sense strand comprises a nucleotide sequence that is at least about 60%, 65%, 70%, 75%, 80%, 85%, 90%, 95%, or 100% identical to the nucleotide sequence of any one of SEQ ID NOs: 1-100, 201-230, 262-287, 314-445, 576-603 or 638 across the entire length of sense strand. In some embodiments, the sense strand comprises a nucleotide sequence that is at least about 70% identical to the nucleotide sequence of any one of SEQ ID NOs: 1-100, 201-230, 262-287, 314-445, 576-603 or 638 across the entire length of sense strand. In some embodiments, the sense strand comprises a nucleotide sequence that is at least about 75% identical to the nucleotide sequence of any one of SEQ ID NOs: 1-100, 201-230, 262-287, 314-445, 576-603 or 638 across the entire length of sense strand. In some embodiments, the sense strand comprises a nucleotide sequence that is at least about 80% identical to the nucleotide sequence of any one of SEQ ID NOs: 1-100, 201-230, 262-287, 314-445, 576-603 or 638 across the entire length of sense strand. In some embodiments, the sense strand comprises a nucleotide sequence that is at least about 85% identical to the nucleotide sequence of any one of SEQ ID NOs: 1-100, 201-230, 262-287, 314-445, 576-603 or 638 across the entire length of sense strand. In some embodiments, the sense strand comprises a nucleotide sequence that is at least about 90% identical to the nucleotide sequence of any one of SEQ ID NOs: 1-100, 201-230, 262-287, 314-445, 576-603 or 638 across the entire length of sense strand. In some embodiments, the sense strand comprises a nucleotide sequence that is at least about 95% identical to the nucleotide sequence of any one of SEQ ID NOs: 1-100, 201-230, 262-287, 314-445, 576-603 or 638 across the entire length of sense strand. In some embodiments, the sense strand comprises a nucleotide sequence that is about 100% identical to the nucleotide sequence of any one of SEQ ID NOs: 1-100, 201-230, 262-287, 314-445, 576-603 or 638 across the entire length of sense strand.

[0097] In some embodiments, the sense strand comprises at least about 15, 16, 17, 18, 19, 20, or 21 consecutive nucleotides of the nucleotide sequence of any one of SEQ ID NOs: 1-100, 201-230, 262-287, 314-445, 576-603 or 638. In some embodiments, the sense strand comprises at least about 17 consecutive nucleotides of the nucleotide sequence of any one of SEQ ID NOs: 1-100, 201-230, 262-287, 314-445, 576-603 or 638. In some embodiments, the sense strand comprises at least about 18 consecutive nucleotides of the nucleotide sequence of any one of SEQ ID NOs: 1-100, 201-230, 262-287, 314-445, 576-603 or 638. In some embodiments, the sense strand comprises at least about 19 consecutive nucleotides of the nucleotide sequence of any one of SEQ ID NOs: 1-100, 201-230, 262-287, 314-445, 576-603 or 638. In some embodiments, the sense strand comprises at least about 20 consecutive nucleotides of the nucleotide sequence of any one of SEQ ID NOs: 1-100, 201-230, 262-287, 314-445, 576-603 or 638. In some embodiments, the sense strand comprises at least about 21 consecutive nucleotides of the nucleotide sequence of any one of SEQ ID NOs: 1-100, 201-230, 262-287, 314-445, 576-603 or 638.

[0098] In some embodiments, the sense strand comprises a nucleotide sequence having less than or equal to 5, 4, 3, 2, or 1 mismatches to the nucleotide sequence of any one of SEQ ID NOs: 101-200, 231-260, 288-313, 446-575, 604-637 or 639-644 across the entire length of the sense strand. In some embodiments, the sense strand comprises a nucleotide sequence having less than or equal to 5 mismatches to the nucleotide sequence of any one of SEQ ID NOs: 101-200, 231-260, 288-313, 446-575, 604-637 or 639-644 across the entire length of the sense strand. In some embodiments, the sense strand comprises a nucleotide sequence having less than or equal to 4 mismatches to the nucleotide sequence of any one of SEQ ID NOs: 101-200, 231-260, 288-313, 446-575, 604-637 or 639-644 across the entire length of the sense strand. In some embodiments, the sense strand comprises a nucleotide sequence having less than or equal to 3 mismatches to the nucleotide sequence of any one of SEQ ID NOs: 101-200, 231-260, 288-313, 446-575, 604-637 or 639-644 across the entire length of the sense strand. In some embodiments, the sense strand comprises a nucleotide sequence having less than or equal to 2 mismatches to the nucleotide sequence of any one of SEQ ID NOs: 101-200, 231-260, 288-313, 446-575, 604-637 or 639-644 across the entire length of the sense strand. In some embodiments, the sense strand comprises a nucleotide sequence having less than or equal to 1 mismatches to the nucleotide sequence of any one of SEQ ID NOs: 101-200, 231-260, 288-313, 446-575, 604-637 or 639-644 across the entire length of the sense strand. In some embodiments, the sense strand comprises a nucleotide sequence having 0 mismatches to the nucleotide sequence of any one of SEQ ID NOs: 101-200, 231-260, 288-313, 446-575, 604-637 or 639-644 across the entire length of the sense strand.

[0099] In some embodiments, the sense strand comprises a nucleotide sequence of any of the sense strands listed in Table 8 or Table 9 or Table 10 or Table 11 or Table 12. In some embodiments, the sense strand comprises a nucleotide sequence of any of the sense strands listed in Table 8. In some embodiments, the sense strand comprises a nucleotide sequence of any of the sense strands listed in Table 9. In some embodiments, the sense strand comprises a nucleotide sequence of any of the sense strands listed in Table 10. In some embodiments, the sense strand comprises a nucleotide sequence of any of the sense strands listed in Table 11. In some embodiments, the sense strand comprises a nucleotide sequence of any of the sense strands listed in Table 12.

[0100] In some embodiments, the sense strand may comprise an overhang sequence. In some embodiments, the overhang sequence comprises at least about 1, 2, 3, 4, or 5 or more nucleotides. In some embodiments, the overhang sequence comprises at least about 1 nucleotide. In some embodiments, the overhang sequence comprises at least about 2 nucleotides. In some embodiments, the overhang sequence comprises at least about 3 nucleotides. In some embodiments, the overhang sequence comprises at least about 4 nucleotides. In some embodiments, the overhang sequence comprises at least about 5 nucleotides.

[0101] In some embodiments, the sense strand may comprise at least 1, 2, 3, or 4 phosphorothioate internucleoside linkages. In some embodiments, at least one phosphorothioate internucleoside linkage is between the nucleotides at positions 1 and 2 from the 5′ end of the sense strand. In some embodiments, at least one phosphorothioate internucleoside linkage is between the nucleotides at positions 2 and 3 from the 5′ end of the sense strand. In some embodiments, at least one phosphorothioate internucleoside linkage is between the nucleotides at positions 1 and 2 from the 3′ end of the sense strand. In some embodiments, at least one phosphorothioate internucleoside linkage is between the nucleotides at positions 2 and 3 from the 3′ end of the sense strand.

[0102] In some embodiments, the sense strand may comprise a nucleotide sequence comprising 2′-fluoro nucleotides at positions 3, 7-9, 12 and 17. In some embodiments, the sense strand may comprise a nucleotide sequence comprising 2′-fluoro nucleotides at positions 3, 7, 8, and 17. In some embodiments, the sense strand may comprise a nucleotide sequence comprising 2′-fluoro nucleotides at positions 5 and 7-9 from the 5′ end of the nucleotide sequence. In some embodiments, the sense strand may comprise a nucleotide sequence comprising 2′-fluoro nucleotides at positions 7 and 9-11 from the 5′ end of the nucleotide sequence. In some embodiments, the sense strand may comprise a nucleotide comprising 2′-fluoro nucleotides at positions 5, 9-11, 14, and 19 from the 5′ end of the nucleotide sequence. In some embodiments, the sense strand may comprise a nucleotide sequence consisting of 19 to 23, or 19 to 21, nucleotides, wherein 2′-fluoro nucleotides are at positions 5 and 7-9 from the 5′ end of the nucleotide sequence. In some embodiments, the sense strand may comprise a nucleotide sequence consisting of 19 to 23, or 19 to 21, nucleotides, wherein 2′-fluoro nucleotides are at positions 7 and 9-11 from the 5′ end of the nucleotide sequence. In some embodiments, the sense strand may comprise a nucleotide sequence consisting of 19 to 23, or 19 to 21, nucleotides, wherein 2′-fluoro nucleotides are at positions 5, 9-11, 14, and 19 from the 5′ end of the nucleotide sequence. In some embodiments, the nucleotide at position 5, 9, 10, and/or 11 from the 5′ end of the first nucleotide sequence is a 2′-fluoro nucleotide. Antisense Strand

[0103] Any of the siRNA molecules described herein may comprise an antisense strand. In some embodiments, the antisense strand comprises between about 15 to about 50 nucleotides. In some embodiments, the antisense strand comprises between about 15 to about 45 nucleotides. In some embodiments, the antisense strand comprises between about 15 to about 40 nucleotides. In some embodiments, the antisense strand comprises between about 15 to about 35 nucleotides. In some embodiments, the antisense strand comprises between about 15 to about 30 nucleotides. In some embodiments, the antisense strand comprises between about 15 to about 25 nucleotides. In some embodiments, the antisense strand comprises between about 17 to about 23 nucleotides. In some embodiments, the antisense strand comprises between about 17 to about 22 nucleotides. In some embodiments, the antisense strand comprises between about 17 to about 21 nucleotides. In some embodiments, the antisense strand comprises between about 18 to about 23 nucleotides. In some embodiments, the antisense strand comprises between about 18 to about 22 nucleotides. In some embodiments, the antisense strand comprises between about 18 to about 21 nucleotides. In some embodiments, the antisense strand comprises between about 19 to about 23 nucleotides. In some embodiments, the antisense strand comprises between about 19 to about 22 nucleotides. In some embodiments, the antisense strand comprises between about 19 to about 21 nucleotides.

[0104] In some embodiments, the antisense strand comprises at least about 15, 16, 17, 18, 19, 20, 21, 22, 23, 24, 25, 26, 27, 28, 29, or 30 or more nucleotides. In some embodiments, the antisense strand comprises at least about 15 nucleotides. In some embodiments, the antisense strand comprises at least about 16 nucleotides. In some embodiments, the antisense strand comprises at least about 17 nucleotides. In some embodiments, the antisense strand comprises at least about 18 nucleotides. In some embodiments, the antisense strand comprises at least about 19 nucleotides. In some embodiments, the antisense strand comprises at least about 20 nucleotides. In some embodiments, the antisense strand comprises at least about 21 nucleotides. In some embodiments, the antisense strand comprises at least about 22 nucleotides. In some embodiments, the antisense strand comprises at least about 23 nucleotides.

[0105] In some embodiments, the antisense strand comprises less than about 50, 45, 40, 35, 30, 29, 28, 27, 26, 25, 24, 23, 22, 21, 20, or 19 or fewer nucleotides. In some embodiments, the antisense strand comprises less than about 30 nucleotides. In some embodiments, the antisense strand comprises less than about 25 nucleotides. In some embodiments, the antisense strand comprises less than about 24 nucleotides. In some embodiments, the antisense strand comprises less than about 23 nucleotides. In some embodiments, the antisense strand comprises less than about 22 nucleotides. In some embodiments, the antisense strand comprises less than about 21 nucleotides. In some embodiments, the antisense strand comprises less than about 20 nucleotides. In some embodiments, the antisense strand comprises less than about 19 nucleotides.

[0106] In some embodiments, the antisense strand comprises a sequence that is at least about 60%, 65%, 70%, 75%, 80%, 85%, 90%, 95%, or 100% complementary to a fragment of the HSD17B13 gene across the entire length of the antisense strand. In some embodiments, the antisense strand comprises a sequence that is at least about 70% complementary to a fragment of the HSD17B13 gene across the entire length of the antisense strand. In some embodiments, the antisense strand comprises a sequence that is at least about 75% complementary to a fragment of the HSD17B13 gene across the entire length of the antisense strand. In some embodiments, the antisense strand comprises a sequence that is at least about 80% complementary to a fragment of the HSD17B13 gene across the entire length of the antisense strand. In some embodiments, the antisense strand comprises a sequence that is at least about 85% complementary to a fragment of the HSD17B13 gene across the entire length of the antisense strand. In some embodiments, the antisense strand comprises a sequence that is at least about 90% complementary to a fragment of the HSD17B13 gene across the entire length of the antisense strand. In some embodiments, the antisense strand comprises a sequence that is at least about 95% complementary to a fragment of the HSD17B13 gene across the entire length of the antisense strand. In some embodiments, the antisense strand comprises a sequence that is about 100% complementary to a fragment of the HSD17B13 gene across the entire length of the antisense strand. In some embodiments, the fragment of the HSD17B13 gene consists of about 15, 16, 17, 18, 19, 20, 21, 22, 23, 24, 25, 26, 27, 28, 29, or 30 consecutive nucleotides of the HSD17B13 gene. In some embodiments, the fragment of the HSD17B13 gene consists of about 15 consecutive nucleotides of the HSD17B13 gene. In some embodiments, the fragment of the HSD17B13 gene consists of about 16 consecutive nucleotides of the HSD17B13 gene. In some embodiments, the fragment of the HSD17B13 gene consists of about 17 consecutive nucleotides of the HSD17B13 gene. In some embodiments, the fragment of the HSD17B13 gene consists of about 18 consecutive nucleotides of the HSD17B13 gene. In some embodiments, the fragment of the HSD17B13 gene consists of about 19 consecutive nucleotides of the HSD17B13 gene. In some embodiments, the fragment of the HSD17B13 gene consists of about 20 consecutive nucleotides of the HSD17B13 gene. In some embodiments, the fragment of the HSD17B13 gene consists of about 21 consecutive nucleotides of the HSD17B13 gene. In some embodiments, the fragment of the HSD17B13 gene consists of about 22 consecutive nucleotides of the HSD17B13 gene. In some embodiments, the fragment of the HSD17B13 gene consists of about 23 consecutive nucleotides of the HSD17B13 gene.

[0107] In some embodiments, the antisense strand comprises a sequence having between about 15 to about 50 consecutive nucleotides complementary to a fragment of the HSD17B13 gene. In some embodiments, the antisense strand comprises a sequence having between about 15 to about 45 consecutive nucleotides complementary to a fragment of the HSD17B13 gene. In some embodiments, the antisense strand comprises a sequence having between about 15 to about 40 consecutive nucleotides complementary to a fragment of the HSD17B13 gene. In some embodiments, the antisense strand comprises a sequence having between about 15 to about 35 consecutive nucleotides complementary to a fragment of the HSD17B13 gene. In some embodiments, the antisense strand comprises a sequence having between about 15 to about 30 consecutive nucleotides complementary to a fragment of the HSD17B13 gene. In some embodiments, the antisense strand comprises a sequence having between about 15 to about 25 consecutive nucleotides complementary to a fragment of the HSD17B13 gene. In some embodiments, the antisense strand comprises between about 17 to about 23 consecutive nucleotides complementary to a fragment of the HSD17B13 gene. In some embodiments, the antisense strand comprises between about 17 to about 22 consecutive nucleotides complementary to a fragment of the HSD17B13 gene. In some embodiments, the antisense strand comprises between about 17 to about 21 consecutive nucleotides complementary to a fragment of the HSD17B13 gene. In some embodiments, the antisense strand comprises between about 18 to about 23 consecutive nucleotides complementary to a fragment of the HSD17B13 gene. In some embodiments, the antisense strand comprises between about 18 to about 22 consecutive nucleotides complementary to a fragment of the HSD17B13 gene. In some embodiments, the antisense strand comprises between about 18 to about 21 consecutive nucleotides complementary to a fragment of the HSD17B13 gene. In some embodiments, the antisense strand comprises between about 19 to about 23 consecutive nucleotides complementary to a fragment of the HSD17B13 gene. In some embodiments, the antisense strand comprises between about 19 to about 22 consecutive nucleotides of a fragment of the HSD17B13 gene. In some embodiments, the antisense strand comprises between about 19 to about 21 consecutive nucleotides complementary to a fragment of the HSD17B13 gene. In some embodiments, the fragment of the HSD17B13 gene consists of about 15, 16, 17, 18, 19, 20, 21, 22, 23, 24, 25, 26, 27, 28, 29, or 30 consecutive nucleotides of the HSD17B13 gene. In some embodiments, the fragment of the HSD17B13 gene consists of about 15 consecutive nucleotides of the HSD17B13 gene. In some embodiments, the fragment of the HSD17B13 gene consists of about 16 consecutive nucleotides of the HSD17B13 gene. In some embodiments, the fragment of the HSD17B13 gene consists of about 17 consecutive nucleotides of the HSD17B13 gene. In some embodiments, the fragment of the HSD17B13 gene consists of about 18 consecutive nucleotides of the HSD17B13 gene. In some embodiments, the fragment of the HSD17B13 gene consists of about 19 consecutive nucleotides of the HSD17B13 gene. In some embodiments, the fragment of the HSD17B13 gene consists of about 20 consecutive nucleotides of the HSD17B13 gene. In some embodiments, the fragment of the HSD17B13 gene consists of about 21 consecutive nucleotides of the HSD17B13 gene. In some embodiments, the fragment of the HSD17B13 gene consists of about 22 consecutive nucleotides of the HSD17B13 gene. In some embodiments, the fragment of the HSD17B13 gene consists of about 23 consecutive nucleotides of the HSD17B13 gene.

[0108] In some embodiments, the antisense strand comprises a sequence having at least about 15, 16, 17, 18, 19, 20, 21, 22, 23, 24, 25, 26, 27, 28, 29, or 30 or more consecutive nucleotides complementary to a fragment of the HSD17B13 gene. In some embodiments, the antisense strand comprises a sequence having at least about 15 consecutive nucleotides complementary to a fragment of the HSD17B13 gene. In some embodiments, the antisense strand comprises a sequence having at least about 16 consecutive nucleotides complementary to a fragment of the HSD17B13 gene. In some embodiments, the antisense strand comprises a sequence having at least about 17 consecutive nucleotides complementary to a fragment of the HSD17B13 gene. In some embodiments, the antisense strand comprises a sequence having at least about 18 consecutive nucleotides complementary to a fragment of the HSD17B13 gene. In some embodiments, the antisense strand comprises a sequence having at least about 19 consecutive nucleotides complementary to a fragment of the HSD17B13 gene. In some embodiments, the antisense strand comprises a sequence having at least about 20 consecutive nucleotides complementary to a fragment of the HSD17B13 gene. In some embodiments, the antisense strand comprises a sequence having at least about 21 consecutive nucleotides complementary to a fragment of the HSD17B13 gene. In some embodiments, the antisense strand comprises a sequence having at least about 22 consecutive nucleotides complementary to a fragment of the HSD17B13 gene. In some embodiments, the antisense strand comprises a sequence having at least about 23 consecutive nucleotides complementary to a fragment of the HSD17B13 gene. In some embodiments, the fragment of the HSD17B13 gene consists of about 15, 16, 17, 18, 19, 20, 21, 22, 23, 24, 25, 26, 27, 28, 29, or 30 consecutive nucleotides of the HSD17B13 gene. In some embodiments, the fragment of the HSD17B13 gene consists of about 15 consecutive nucleotides of the HSD17B13 gene. In some embodiments, the fragment of the HSD17B13 gene consists of about 16 consecutive nucleotides of the HSD17B13 gene. In some embodiments, the fragment of the HSD17B13 gene consists of about 17 consecutive nucleotides of the HSD17B13 gene. In some embodiments, the fragment of the HSD17B13 gene consists of about 18 consecutive nucleotides of the HSD17B13 gene. In some embodiments, the fragment of the HSD17B13 gene consists of about 19 consecutive nucleotides of the HSD17B13 gene. In some embodiments, the fragment of the HSD17B13 gene consists of about 20 consecutive nucleotides of the HSD17B13 gene. In some embodiments, the fragment of the HSD17B13 gene consists of about 21 consecutive nucleotides of the HSD17B13 gene. In some embodiments, the fragment of the HSD17B13 gene consists of about 22 consecutive nucleotides of the HSD17B13 gene. In some embodiments, the fragment of the HSD17B13 gene consists of about 23 consecutive nucleotides of the HSD17B13 gene.

[0109] In some embodiments, the antisense strand comprises a sequence having less than about 50, 45, 40, 35, 30, 29, 28, 27, 26, 25, 24, 23, 22, 21, 20, or 19 or fewer consecutive nucleotides complementary to a fragment of the HSD17B13 gene. In some embodiments, the antisense strand comprises a sequence having less than about 35 consecutive nucleotides complementary to a fragment of the HSD17B13 gene. In some embodiments, the antisense strand comprises a sequence having less than about 30 consecutive nucleotides complementary to a fragment of the HSD17B13 gene. In some embodiments, the antisense strand comprises a sequence having less than about 25 consecutive nucleotides complementary to a fragment of the HSD17B13 gene. In some embodiments, the antisense strand comprises a sequence having less than about 24 consecutive nucleotides complementary to a fragment of the HSD17B13 gene. In some embodiments, the antisense strand comprises a sequence having less than about 23 consecutive nucleotides complementary to a fragment of the HSD17B13 gene. In some embodiments, the antisense strand comprises a sequence having less than about 22 consecutive nucleotides complementary to a fragment of the HSD17B13 gene. In some embodiments, the antisense strand comprises a sequence having less than about 21 consecutive nucleotides complementary to a fragment of the HSD17B13 gene. In some embodiments, the antisense strand comprises a sequence having less than about 20 consecutive nucleotides complementary to a fragment of the HSD17B13 gene. In some embodiments, the antisense strand comprises a sequence having less than about 19 consecutive nucleotides complementary to a fragment of the HSD17B13 gene. In some embodiments, the fragment of the HSD17B13 gene consists of about 15, 16, 17, 18, 19, 20, 21, 22, 23, 24, 25, 26, 27, 28, 29, or 30 consecutive nucleotides of the HSD17B13 gene. In some embodiments, the fragment of the HSD17B13 gene consists of about 15 consecutive nucleotides of the HSD17B13 gene. In some embodiments, the fragment of the HSD17B13 gene consists of about 16 consecutive nucleotides of the HSD17B13 gene. In some embodiments, the fragment of the HSD17B13 gene consists of about 17 consecutive nucleotides of the HSD17B13 gene. In some embodiments, the fragment of the HSD17B13 gene consists of about 18 consecutive nucleotides of the HSD17B13 gene. In some embodiments, the fragment of the HSD17B13 gene consists of about 19 consecutive nucleotides of the HSD17B13 gene. In some embodiments, the fragment of the HSD17B13 gene consists of about 20 consecutive nucleotides of the HSD17B13 gene. In some embodiments, the fragment of the HSD17B13 gene consists of about 21 consecutive nucleotides of the HSD17B13 gene. In some embodiments, the fragment of the HSD17B13 gene consists of about 22 consecutive nucleotides of the HSD17B13 gene. In some embodiments, the fragment of the HSD17B13 gene consists of about 23 consecutive nucleotides of the HSD17B13 gene.

[0110] In some embodiments, the antisense strand comprises a sequence having less than or equal to 5, 4, 3, 2, or 1 mismatches to a fragment of the HSD17B13 gene across the entire length of the antisense strand, wherein the fragment of the HSD17B13 gene consists of about 15, 16, 17, 18, 19, 20, 21, 22, 23, 24, 25, 26, 27, 28, 29, or 30 consecutive nucleotides of the HSD17B13 gene. In some embodiments, the antisense strand comprises a sequence having less than or equal to 5 mismatches to a fragment of the HSD17B13 gene across the entire length of the antisense strand, wherein the fragment of the HSD17B13 gene consists of about 15, 16, 17, 18, 19, 20, 21, 22, 23, 24, 25, 26, 27, 28, 29, or 30 consecutive nucleotides of the HSD17B13 gene. In some embodiments, the antisense strand comprises a sequence having less than or equal to 4 mismatches to a fragment of the HSD17B13 gene across the entire length of the antisense strand, wherein the fragment of the HSD17B13 gene consists of about 15, 16, 17, 18, 19, 20, 21, 22, 23, 24, 25, 26, 27, 28, 29, or 30 consecutive nucleotides of the HSD17B13 gene. In some embodiments, the antisense strand comprises a sequence having less than or equal to 3 mismatches to a fragment of the HSD17B13 gene across the entire length of the antisense strand, wherein the fragment of the HSD17B13 gene consists of about 15, 16, 17, 18, 19, 20, 21, 22, 23, 24, 25, 26, 27, 28, 29, or 30 consecutive nucleotides of the HSD17B13 gene. In some embodiments, the antisense strand comprises a sequence having less than or equal to 2 mismatches to a fragment of the HSD17B13 gene across the entire length of the antisense strand, wherein the fragment of the HSD17B13 gene consists of about 15, 16, 17, 18, 19, 20, 21, 22, 23, 24, 25, 26, 27, 28, 29, or 30 consecutive nucleotides of the HSD17B13 gene. In some embodiments, the antisense strand comprises a sequence having less than or equal to 1 mismatches to a fragment of the HSD17B13 gene across the entire length of the antisense strand, wherein the fragment of the HSD17B13 gene consists of about 15, 16, 17, 18, 19, 20, 21, 22, 23, 24, 25, 26, 27, 28, 29, or 30 consecutive nucleotides of the HSD17B13 gene. In some embodiments, the antisense strand comprises a sequence having 0 mismatches to a fragment of the HSD17B13 gene across the entire length of the antisense strand, wherein the fragment of the HSD17B13 gene consists of about 15, 16, 17, 18, 19, 20, 21, 22, 23, 24, 25, 26, 27, 28, 29, or 30 consecutive nucleotides of the HSD17B13 gene. In some embodiments, the fragment of the HSD17B13 gene consists of about 15 consecutive nucleotides of the HSD17B13 gene. In some embodiments, the fragment of the HSD17B13 gene consists of about 16 consecutive nucleotides of the HSD17B13 gene. In some embodiments, the fragment of the HSD17B13 gene consists of about 17 consecutive nucleotides of the HSD17B13 gene. In some embodiments, the fragment of the HSD17B13 gene consists of about 18 consecutive nucleotides of the HSD17B13 gene. In some embodiments, the fragment of the HSD17B13 gene consists of about 19 consecutive nucleotides of the HSD17B13 gene. In some embodiments, the fragment of the HSD17B13 gene consists of about 20 consecutive nucleotides of the HSD17B13 gene. In some embodiments, the fragment of the HSD17B13 gene consists of about 21 consecutive nucleotides of the HSD17B13 gene. In some embodiments, the fragment of the HSD17B13 gene consists of about 22 consecutive nucleotides of the HSD17B13 gene. In some embodiments, the fragment of the HSD17B13 gene consists of about 23 consecutive nucleotides of the HSD17B13 gene.

[0111] In some embodiments, the antisense strand comprises a nucleotide sequence of any one of SEQ ID NOs: 101-200, 231-260, 288-313, 446-575, 604-637 or 639-644. In some embodiments, the antisense strand comprises a nucleotide sequence that is at least about 60%, 65%, 70%, 75%, 80%, 85%, 90%, 95%, or 100% identical to the nucleotide sequence of any one of SEQ ID NOs: 101-200, 231-260, 288-313, 446-575, 604-637 or 639-644 across the entire length of antisense strand. In some embodiments, the antisense strand comprises a nucleotide sequence that is at least about 70% identical to the nucleotide sequence of any one of SEQ ID NOs: 101-200, 231-260, 288-313, 446-575, 604-637 or 639-644 across the entire length of antisense strand. In some embodiments, the antisense strand comprises a nucleotide sequence that is at least about 75% identical to the nucleotide sequence of any one of SEQ ID NOs: 101-200, 231-260, 288-313, 446-575, 604-637 or 639-644 across the entire length of antisense strand. In some embodiments, the antisense strand comprises a nucleotide sequence that is at least about 80% identical to the nucleotide sequence of any one of SEQ ID NOs: 101-200, 231-260, 288-313, 446-575, 604-637 or 639-644 across the entire length of antisense strand. In some embodiments, the antisense strand comprises a nucleotide sequence that is at least about 85% identical to the nucleotide sequence of any one of SEQ ID NOs: 101-200, 231-260, 288-313, 446-575, 604-637 or 639-644 across the entire length of antisense strand. In some embodiments, the antisense strand comprises a nucleotide sequence that is at least about 90% identical to the nucleotide sequence of any one of SEQ ID NOs: 101-200, 231-260, 288-313, 446-575, 604-637 or 639-644 across the entire length of antisense strand. In some embodiments, the antisense strand comprises a nucleotide sequence that is at least about 95% identical to the nucleotide sequence of any one of SEQ ID NOs: 101-200, 231-260, 288-313, 446-575, 604-637 or 639-644 across the entire length of antisense strand. In some embodiments, the antisense strand comprises a nucleotide sequence that is about 100% identical to the nucleotide sequence of any one of SEQ ID NOs: 101-200, 231-260, 288-313, 446-575, 604-637 or 639-644 across the entire length of antisense strand

[0112] In some embodiments, the antisense strand comprises at least about 15, 16, 17, 18, 19, 20, 21, 22, or 23 consecutive nucleotides of the nucleotide sequence of any one of SEQ ID NOs: 101-200, 231-260, 288-313, 446-575, 604-637 or 639-644. In some embodiments, the antisense strand comprises at least about 17 consecutive nucleotides of the nucleotide sequence of any one of SEQ ID NOs: 101-200, 231-260, 288-313, 446-575, 604-637 or 639-644. In some embodiments, the antisense strand comprises at least about 18 consecutive nucleotides of the nucleotide sequence of any one of SEQ ID NOs: 101-200, 231-260, 288-313, 446-575, 604-637 or 639-644. In some embodiments, the antisense strand comprises at least about 19 consecutive nucleotides of the nucleotide sequence of any one of SEQ ID NOs: 101-200, 231-260, 288-313, 446-575, 604-637 or 639-644. In some embodiments, the antisense strand comprises at least about 20 consecutive nucleotides of the nucleotide sequence of any one of SEQ ID NOs: 101-200, 231-260, 288-313, 446-575, 604-637 or 639-644. In some embodiments, the antisense strand comprises at least about 21 consecutive nucleotides of the nucleotide sequence of any one of SEQ ID NOs: 101-200, 231-260, 288-313, 446-575, 604-637 or 639-644. In some embodiments, the antisense strand comprises at least about 22 consecutive nucleotides of the nucleotide sequence of any one of SEQ ID NOs: 101-200, 231-260, 288-313, 446-575, 604-637 or 639-644. In some embodiments, the antisense strand comprises at least about 23 consecutive nucleotides of the nucleotide sequence of any one of SEQ ID NOs: 101-200, 231-260, 288-313, 446-575, 604-637 or 639-644.

[0113] In some embodiments, the antisense strand comprises a nucleotide sequence having less than or equal to 5, 4, 3, 2, or 1 mismatches to the nucleotide sequence of any one of SEQ ID NOs: 1-100, 201-230, 262-287, 314-445, 576-603 or 638 across the entire length of the antisense strand. In some embodiments, the antisense strand comprises a nucleotide sequence having less than or equal to 5 mismatches to the nucleotide sequence of any one of SEQ ID NOs: 1-100, 201-230, 262-287, 314-445, 576-603 or 638 across the entire length of the antisense strand. In some embodiments, the antisense strand comprises a nucleotide sequence having less than or equal to 4 mismatches to the nucleotide sequence of any one of SEQ ID NOs: 1-100, 201-230, 262-287, 314-445, 576-603 or 638 across the entire length of the antisense strand. In some embodiments, the antisense strand comprises a nucleotide sequence having less than or equal to 3 mismatches to the nucleotide sequence of any one of SEQ ID NOs: 1-100, 201-230, 262-287, 314-445, 576-603 or 638 across the entire length of the antisense strand. In some embodiments, the antisense strand comprises a nucleotide sequence having less than or equal to 2 mismatches to the nucleotide sequence of any one of SEQ ID NOs: 1-100, 201-230, 262-287, 314-445, 576-603 or 638 across the entire length of the antisense strand. In some embodiments, the antisense strand comprises a nucleotide sequence having less than or equal to 1 mismatches to the nucleotide sequence of any one of SEQ ID NOs: 1-100, 201-230, 262-287, 314-445, 576-603 or 638 across the entire length of the antisense strand. In some embodiments, the antisense strand comprises a nucleotide sequence having 0 mismatches to the nucleotide sequence of any one of SEQ ID NOs: 1-100, 201-230, 262-287, 314-445, 576-603 or 638 across the entire length of the antisense strand.

[0114] In some embodiments, the antisense strand comprises a nucleotide sequence of any of the antisense strands listed in Table 8 or Table 9 or Table 10 or Table 11 or Table 12. In some embodiments, the antisense strand comprises a nucleotide sequence of any of the antisense strands listed in Table 8. In some embodiments, the antisense strand comprises a nucleotide sequence of any of the antisense strands listed in Table 9. In some embodiments, the antisense strand comprises a nucleotide sequence of any of the antisense strands listed in Table 10. In some embodiments, the antisense strand comprises a nucleotide sequence of any of the antisense strands listed in Table 11. In some embodiments, the antisense strand comprises a nucleotide sequence of any of the antisense strands listed in Table 12.

[0115] In some embodiments, the antisense strand may comprise an overhang sequence at either the 3′ or 5′ end. In some embodiments, the overhang sequence comprises at least about 1, 2, 3, 4, or 5 or more nucleotides. In some embodiments, the overhang sequence comprises at least about 1 nucleotide. In some embodiments, the overhang sequence comprises at least about 2 nucleotides. In some embodiments, the overhang sequence comprises at least about 3 nucleotides. In some embodiments, the overhang sequence comprises at least about 4 nucleotides. In some embodiments, the overhang sequence comprises at least about 5 nucleotides. In some embodiments, the overhang sequence comprises a UU sequence.

[0116] In some embodiments, the antisense strand may comprise at least 1, 2, 3, or 4 phosphorothioate internucleoside linkages. In some embodiments, at least one phosphorothioate internucleoside linkage is between the nucleotides at positions 1 and 2 from the 5′ end of the antisense strand. In some embodiments, at least one phosphorothioate internucleoside linkage is between the nucleotides at positions 2 and 3 from the 5′ end of the antisense strand. In some embodiments, at least one phosphorothioate internucleoside linkage is between the nucleotides at positions 1 and 2 from the 3′ end of the antisense strand. In some embodiments, at least one phosphorothioate internucleoside linkage is between the nucleotides at positions 2 and 3 from the 3′ end of the antisense strand.

[0117] In some embodiments, the antisense strand may comprise a nucleotide sequence comprising 2′-fluoro nucleotides at positions 2, 6, 14, and 16 from the 5′ end of the nucleotide sequence. In some embodiments, the antisense strand may comprise a nucleotide sequence comprising 2′-fluoro nucleotides at positions 2 and 14 from the 5′ end of the nucleotide sequence. In some embodiments, the antisense strand may comprise a nucleotide sequence comprising 2′-fluoro nucleotides at positions 2, 5, 8, 14, and 17 from the 5′ end of the nucleotide sequence.

[0118] In some embodiments, the antisense strand may comprise a nucleotide sequence consisting of 17 to 23, or 19 to 23, nucleotides, wherein 2′-fluoro nucleotides are at positions 2, 6, 14, and 16 from the 5′ end of the nucleotide sequence. In some embodiments, the antisense strand may comprise a nucleotide sequence consisting of 17 to 23, or 19 to 23, nucleotides, wherein 2′-fluoro nucleotides are at positions 2 and 14 from the 5′ end of the nucleotide sequence. In some embodiments, the antisense strand may comprise a nucleotide sequence consisting of 17 to 23, or 19 to 23, nucleotides, wherein 2′-fluoro nucleotides are at positions 2, 5, 8, 14, and 17 from the 5′ end of the nucleotide sequence. In some embodiments, the antisense strand may comprise a nucleotide sequence consisting of 17 to 23, or 19 to 23, nucleotides, wherein 2′-fluoro nucleotides are at positions 2, 6, 10, 14, and 18.

Modified siRNAs

[0119] In some embodiments, the siRNA molecules disclosed herein may be chemically modified. In some embodiments, the siRNA molecules may be modified, for example, to enhance stability and/or bioavailability and/or provide otherwise beneficial characteristics in vitro, in vivo, and/or ex vivo. For example, siRNA molecules may be modified such that the two strands (sense and antisense) maintain the ability to hybridize to each other and/or the siRNA molecules maintain the ability to hybridize to a target sequence. Examples of siRNA modifications include modifications to the ribose sugar, nucleobase, and/or phosphodiester backbone, including but not limited to those described herein. Non-limiting examples of siRNA modifications are described, e.g., in WO 2020/243490; WO 2020/097342; WO 2021/119325; PCT/US2021/019629; PCT/US2021/019628; PCT/US2021/021199; Sig. Transduct. Target Ther. 5 (101), 1-25, 2020; and J. Am. Chem. Soc. 136 (49), 16958-16961, 2014, the contents of each of which are hereby incorporated herein by reference in their entirety.

[0120] In some embodiments, the siRNA molecules disclosed herein comprise modified nucleotides having a modification of the ribose sugar. These sugar modifications can include modifications at the 2′ and/or 5′ position of the pentose ring as well as bicyclic sugar modifications. A 2′-modified nucleotide refers to a nucleotide having a pentose ring with a substituent at the 2′ position other than H or OH. Such 2′ modifications include, but are not limited to, 2′-OH, 2′-S-alkyl, 2′-N-alkyl, 2′-O-alkyl, 2′-S-alkenyl, 2′-N-alkenyl, 2′-O-alkenyl, 2′-S-alkynyl, 2′-N-alkynyl, 2′-O-alkynyl, 2′-O-allyl, 2′-C-allyl, 2′-fluoro, 2′-O-methyl (OMe or OCH₃), 2′-O-methoxyethyl, 2′-ara-F, 2′-OCF₃, 2′-O(CH₂)₂SCH₃, 2′-O-aminoalkyl, 2′-amino (e.g. NH₂), 2′-O-ethylamine, and 2′-azido, wherein the alkyl, alkenyl and alkynyl can be substituted or unsubstituted. Modifications at the 5′ position of the pentose ring include, but are not limited to, 5′-methyl (R or S), 5′-vinyl, and 5′-methoxy. Sugar modifications may also include, for example, LNA, UNA, GNA, and DNA. In some embodiments, the siRNA molecules of the disclosure comprise one or more 2′-O-methyl nucleotides, 2′-fluoro nucleotides, or combinations thereof.

[0121] In some embodiments, between about 15 to 30, 15 to 25, 15 to 24, 15 to 23, 15 to 22, 15 to 21, 17 to 30, 17 to 25, 17 to 24, 17 to 23, 17 to 22, 17 to 21, 18 to 30, 18 to 25, 18 to 24, 18 to 23, 18 to 22, 18 to 21, 19 to 30, 19 to 25, 19 to 24, 19 to 23, 19 to 22, 19 to 21, 20 to 25, 20 to 24, 20 to 23, 21 to 25, 21 to 24, or 21 to 23 modified nucleotides of any sense or antisense nucleotide sequences described herein are 2′-O-methyl nucleotides. In some embodiments, between about 2 to 20 modified nucleotides of any sense or antisense nucleotide sequences described herein are 2′-O-methyl nucleotides. In some embodiments, between about 5 to 25 modified nucleotides of any sense or antisense nucleotide sequences described herein are 2′-O-methyl nucleotides. In some embodiments, between about 10 to 25 modified nucleotides of any sense or antisense nucleotide sequences described herein are 2′-O-methyl nucleotides. In some embodiments, between about 12 to 25 modified nucleotides of any sense or antisense nucleotide sequences described herein are 2′-O-methyl nucleotides. In some embodiments, at least about 10, 11, 12, 13, 14, 15, 16, 17, 18, 19, 20, 21, or 22 modified nucleotides of any sense or antisense nucleotide sequences described herein are 2′-O-methyl nucleotides. In some embodiments, at least about 12 modified nucleotides of any sense or antisense nucleotide sequences described herein are 2′-O-methyl nucleotides. In some embodiments, at least about 13 modified nucleotides of any sense or antisense nucleotide sequences described herein are 2′-O-methyl nucleotides. In some embodiments, at least about 14 modified nucleotides of any sense or antisense nucleotide sequences described herein are 2′-O-methyl nucleotides. In some embodiments, at least about 15 modified nucleotides of any sense or antisense nucleotide sequences described herein are 2′-O-methyl nucleotides. In some embodiments, at least about 16 modified nucleotides of any sense or antisense nucleotide sequences described herein are 2′-O-methyl nucleotides. In some embodiments, at least about 17 modified nucleotides of any sense or antisense nucleotide sequences described herein are 2′-O-methyl nucleotides. In some embodiments, at least about 18 modified nucleotides of any sense or antisense nucleotide sequences described herein are 2′-O-methyl nucleotides. In some embodiments, at least about 19 modified nucleotides of any sense or antisense nucleotide sequences described herein are 2′-O-methyl nucleotides. In some embodiments, less than or equal to 25, 24, 23, 22, 21, 20, 19, 18, 17, 16, 15, 14, 13, 12, 11, 10, 9, 8, 7, 6, 5, 4, 3, or 2 modified nucleotides of any sense or antisense nucleotide sequences described herein are 2′-O-methyl nucleotides. In some embodiments, less than or equal to 21 modified nucleotides of any sense or antisense nucleotide sequences described herein are 2′-O-methyl nucleotides. In some embodiments, less than or equal to 20 modified nucleotides of any sense or antisense nucleotide sequences described herein are 2′-O-methyl nucleotides. In some embodiments, less than or equal to 19 modified nucleotides of any sense or antisense nucleotide sequences described herein are 2′-O-methyl nucleotides. In some embodiments, less than or equal to 18 modified nucleotides of any sense or antisense nucleotide sequences described herein are 2′-O-methyl nucleotides. In some embodiments, less than or equal to 17 modified nucleotides of any sense or antisense nucleotide sequences described herein are 2′-O-methyl nucleotides. In some embodiments, less than or equal to 16 modified nucleotides of any sense or antisense nucleotide sequences described herein are 2′-O-methyl nucleotides. In some embodiments, less than or equal to 15 modified nucleotides of any sense or antisense nucleotide sequences described herein are 2′-O-methyl nucleotides. In some embodiments, less than or equal to 14 modified nucleotides of any sense or antisense nucleotide sequences described herein are 2′-O-methyl nucleotides. In some embodiments, less than or equal to 13 modified nucleotides of any sense or antisense nucleotide sequences described herein are 2′-O-methyl nucleotides. In some embodiments, at least one modified nucleotide of any sense or antisense nucleotide sequences described herein is a 2′-O-methyl pyrimidine. In some embodiments, at least 5, 6, 7, 8, 9, or 10 modified nucleotides of any sense or antisense nucleotide sequences described herein are 2′-O-methyl pyrimidines. In some embodiments, at least one modified nucleotide of any sense or antisense nucleotide sequences described herein is a 2′-O-methyl purine. In some embodiments, at least 5, 6, 7, 8, 9, or 10 modified nucleotides of any sense or antisense nucleotide sequences described herein are 2′-O-methyl purines. In some embodiments, the 2′-O-methyl nucleotide is a 2′-O-methyl nucleotide mimic.

[0122] In some embodiments, the nucleotide at position 3, 5, 7, 8, 9, 10, 11, 12, 14, 17, and/or 19 from the 5′ end of any sense or antisense nucleotide sequences described herein is a 2′-fluoro nucleotide. In some embodiments, at least two nucleotides at positions 3, 5, 7, 8, 9, 10, 11, 12, 14, 17, and/or 19 from the 5′ end of any sense or antisense nucleotide sequences described herein are 2′-fluoro nucleotides. In some embodiments, at least three nucleotides at positions 3, 5, 7, 8, 9, 10, 11, 12, 14, 17, and/or 19 from the 5′ end of any sense or antisense nucleotide sequences described herein are 2′-fluoro nucleotides. In some embodiments, at least four nucleotides at positions 3, 5, 7, 8, 9, 10, 11, 12, 14, 17, and/or 19 from the 5′ end of any sense or antisense nucleotide sequences described herein are 2′-fluoro nucleotides. In some embodiments, at least five nucleotides at positions 3, 5, 7, 8, 9, 10, 11, 12, 14, 17, and/or 19 from the 5′ end of any sense or antisense nucleotide sequences described herein are 2′-fluoro nucleotides. In some embodiments, the nucleotides at positions 3, 5, 7, 8, 9, 10, 11, 12, 14, 17, and/or 19 from the 5′ end of any sense or antisense nucleotide sequences described herein are 2′-fluoro nucleotides. In some embodiments, the nucleotide at position 3 from the 5′ end of any sense or antisense nucleotide sequences described herein is a 2′-fluoro nucleotide. In some embodiments, the nucleotide at position 7 from the 5′ end of any sense or antisense nucleotide sequences described herein is a 2′-fluoro nucleotide. In some embodiments, the nucleotide at position 8 from the 5′ end of any sense or antisense nucleotide sequences described herein is a 2′-fluoro nucleotide. In some embodiments, the nucleotide at position 9 from the 5′ end of any sense or antisense nucleotide sequences described herein is a 2′-fluoro nucleotide. In some embodiments, the nucleotide at position 12 from the 5′ end of any sense or antisense nucleotide sequences described herein is a 2′-fluoro nucleotide. In some embodiments, the nucleotide at position 17 from the 5′ end of any sense or antisense nucleotide sequences described herein is a 2′-fluoro nucleotide. In some embodiments, the 2′-fluoro nucleotide is a 2′-fluoro nucleotide mimic.

[0123] In some embodiments, at least 1, 2, 3, 4, 5, 6, or 7 nucleotides at position 1, 3, 5, 7, 8, 9, 10, 11, 12, 14, 17, and/or 19 from the 5′ end of any sense or antisense nucleotide sequences described herein is a 2′-fluoro nucleotide. In some embodiments, the nucleotide at positions 1, 3, 5, 7, 8, 9, 10, 11, 12, 14, 17, and/or 19 from the 5′ end of any sense or antisense nucleotide sequences described herein is a 2′-fluoro nucleotide. In some embodiments, at least two nucleotides at positions 1, 3, 5, 7, 8, 9, 10, 11, 12, 14, 17, and/or 19 from the 5′ end of any sense or antisense nucleotide sequences described herein are 2′-fluoro nucleotides. In some embodiments, at least three nucleotides at positions 1, 3, 5, 7, 8, 9, 10, 11, 12, 14, 17, and/or 19 from the 5′ end of any sense or antisense nucleotide sequences described herein are 2′-fluoro nucleotides. In some embodiments, the nucleotides at positions 1, 3, 5, 7, 8, 9, 10, 11, 12, 14, 17, and/or 19 from the 5′ end of any sense or antisense nucleotide sequences described herein are 2′-fluoro nucleotides. In some embodiments, the 2′-fluoro nucleotide is a 2′-fluoro nucleotide mimic.

[0124] In some embodiments, at least 1, 2, 3, 4, 5, 6, or 7 nucleotides at position 2, 4, 6, 8, 10, 12, 14, 16, and/or 18 from the 5′ end of any sense or antisense nucleotide sequences described herein is a 2′-fluoro nucleotide. In some embodiments, the nucleotide at positions, 4, 6, 8, 10, 12, 14, 16, and/or 18 from the 5′ end of any sense or antisense nucleotide sequences described herein is a 2′-fluoro nucleotide. In some embodiments, at least two nucleotides at positions 2, 4, 6, 8, 10, 12, 14, 16, and/or 18 from the 5′ end of any sense or antisense nucleotide sequences described herein are 2′-fluoro nucleotides. In some embodiments, at least three nucleotides at positions 2, 4, 6, 8, 10, 12, 14, 16, and/or 18 from the 5′ end of any sense or antisense nucleotide sequences described herein are 2′-fluoro nucleotides. In some embodiments, the nucleotides at positions 2, 4, 6, 8, 10, 12, 14, 16, and/or 18 from the 5′ end of any sense or antisense nucleotide sequences described herein are 2′-fluoro nucleotides. In some embodiments, the 2′-fluoro nucleotide is a 2′-fluoro nucleotide mimic.

[0125] In some embodiments, the nucleotide at position 1 from the 5′ end of any sense nucleotide sequences described herein is a 2′-fluoro nucleotide. In some embodiments, the nucleotide at position 3 from the 5′ end of any sense nucleotide sequences described herein is a 2′-fluoro nucleotide. In some embodiments, the nucleotide at position 5 from the 5′ end of any sense nucleotide sequences described herein is a 2′-fluoro nucleotide. In some embodiments, the nucleotide at position 7 from the 5′ end of any sense nucleotide sequences described herein is a 2′-fluoro nucleotide. In some embodiments, the nucleotide at position 8 from the 5′ end of any sense nucleotide sequences described herein is a 2′-fluoro nucleotide. In some embodiments, the nucleotide at position 9 from the 5′ end of any sense nucleotide sequences described herein is a 2′-fluoro nucleotide. In some embodiments, the nucleotide at position 10 from the 5′ end of any sense nucleotide sequences described herein is a 2′-fluoro nucleotide. In some embodiments, the nucleotide at position 11 from the 5′ end of any sense nucleotide sequences described herein is a 2′-fluoro nucleotide. In some embodiments, the nucleotide at position 12 from the 5′ end of any sense nucleotide sequences described herein is a 2′-fluoro nucleotide. In some embodiments, the nucleotide at position 14 from the 5′ end of any sense nucleotide sequences described herein is a 2′-fluoro nucleotide. In some embodiments, the nucleotide at position 17 from the 5′ end of any sense nucleotide sequences described herein is a 2′-fluoro nucleotide. In some embodiments, the nucleotide at position 19 from the 5′ end of any sense nucleotide sequences described herein is a 2′-fluoro nucleotide. In some embodiments, the 2′-fluoro nucleotide is a 2′-fluoro nucleotide mimic.

[0126] In some embodiments, at least 1, 2, 3, 4, 5, 6, or 7 nucleotides at position 1, 3, 5, 7, 8, 9, 10, 11, 12, 14, 17, and/or 19 from the 5′ end of any sense nucleotide sequences described herein is a 2′-fluoro nucleotide. In some embodiments, the nucleotide at position 5, 7, 8, 9, 10, 11, 14, and/or 19 from the 5′ end of any sense nucleotide sequences described herein is a 2′-fluoro nucleotide. In some embodiments, the nucleotide at position 5, 7, 8, and/or 9 from the 5′ end of any sense nucleotide sequences described herein is a 2′-fluoro nucleotide. In some embodiments, the nucleotide at position 7, 9, 10, and/or 11 from the 5′ end of any sense or antisense nucleotide sequences described herein is a 2′-fluoro nucleotide. In some embodiments, the nucleotide at position 5, 9, 10, 11, 14, and/or 19 from the 5′ end of any sense nucleotide sequences described herein is a 2′-fluoro nucleotide. In some embodiments, the 2′-fluoro nucleotide is a 2′-fluoro nucleotide mimic.

[0127] In some embodiments, the nucleotide at position 2 from the 5′ end of any antisense nucleotide sequences described herein is a 2′-fluoro nucleotide. In some embodiments, the nucleotide at position 4 from the 5′ end of any antisense nucleotide sequences described herein is a 2′-fluoro nucleotide. In some embodiments, the nucleotide at position 6 from the 5′ end of any antisense nucleotide sequences described herein is a 2′-fluoro nucleotide. In some embodiments, the nucleotide at position 8 from the 5′ end of any antisense nucleotide sequences described herein is a 2′-fluoro nucleotide. In some embodiments, the nucleotide at position 10 from the 5′ end of any antisense nucleotide sequences described herein is a 2′-fluoro nucleotide. In some embodiments, the nucleotide at position 12 from the 5′ end of any antisense nucleotide sequences described herein is a 2′-fluoro nucleotide. In some embodiments, the nucleotide at position 14 from the 5′ end of any antisense nucleotide sequences described herein is a 2′-fluoro nucleotide. In some embodiments, the nucleotide at position 16 from the 5′ end of any antisense nucleotide sequences described herein is a 2′-fluoro nucleotide. In some embodiments, the nucleotide at position 18 from the 5′ end of any antisense nucleotide sequences described herein is a 2′-fluoro nucleotide. In some embodiments, the 2′-fluoro nucleotide is a 2′-fluoro nucleotide mimic.

[0128] In some embodiments, at least 1, 2, 3, 4, 5, 6, or 7 nucleotides at position 2, 4, 5, 6, 8, 10, 12, 14, 16, 17 and/or 18 from the 5′ end of any antisense nucleotide sequences described herein is a 2′-fluoro nucleotide. In some embodiments, the nucleotide at position 2, 5, 6, 8, 14, 16, and/or 17 from the 5′ end of any antisense nucleotide sequences described herein is a 2′-fluoro nucleotide. In some embodiments, the nucleotide at position 2, 6, 14, and/or 16 from the 5′ end of any antisense nucleotide sequences described herein is a 2′-fluoro nucleotide. In some embodiments, the nucleotide at position 2, and/or 14 from the 5′ end of any antisense nucleotide sequences described herein is a 2′-fluoro nucleotide. In some embodiments, the nucleotide at position 2, 5, 8, 14, and/or 17 from the 5′ end of any antisense nucleotide sequences described herein is a 2′-fluoro nucleotide. In some embodiments, the 2′-fluoro nucleotide is a 2′-fluoro nucleotide mimic.

[0129] In some embodiments, the 2′-fluoro or 2′-O-methyl nucleotide mimic is a nucleotide mimic of Formula (V):

[chemical structure]

wherein Rₓ is independently a nucleobase, aryl, heteroaryl, or H, Q¹ and Q² are independently S or O, R⁵ is independently —OCD₃, —F, or —OCH₃, and R⁶ and R⁷ are independently H, D, or CD₃. In some embodiments, the nucleobase is selected from thymine, cytosine, guanine, adenine, uracil, and an analogue or derivative thereof.

[0130] In some embodiments, the 2′-fluoro or 2′-O-methyl nucleotide mimic is a nucleotide mimic of Formula (16)-Formula (20):

[chemical structure]

[0131] wherein Rₓ is independently a nucleobase and R² is F or —OCH₃. In some embodiments, the nucleobase is selected from thymine, cytosine, guanine, adenine, uracil, and an analogue or derivative thereof.

[0132] In some embodiments, the sense strand or the antisense strand may comprise at least 1, at least 2, at least 3, at least 4, or at least 5 or more modified nucleotide(s) having the following chemical structure

[chemical structure]

wherein Rₓ is a nucleobase, aryl, heteroaryl, or H. In some embodiments, the nucleobase is selected from thymine, cytosine, guanine, adenine, uracil, and an analogue or derivative thereof.

[0133] In some embodiments, the sense strand or the antisense strand may comprise at least 1, at least 2, at least 3, at least 4, or at least 5 or more modified nucleotide(s) having the following chemical structure:

[chemical structure]

wherein Rₓ is a nucleobase. In some embodiments, the nucleobase is selected from thymine, cytosine, guanine, adenine, uracil, and an analogue or derivative thereof.

[0134] In some embodiments, the sense strand or the antisense strand may comprise at least 1, at least 2, at least 3, at least 4, or at least 5 or more modified nucleotide(s) having the following chemical structure:

[chemical structure]

[chemical structure]

wherein B and R_{y} is a nucleobase. In some embodiments, the nucleobase is selected from thymine, cytosine, guanine, adenine, uracil, and an analogue or derivative thereof.

[0135] In some embodiments, any sense or antisense nucleotide sequence described herein comprises, consists of, or consists essentially of ribonucleic acids (RNAs). In some embodiments, any sense or antisense nucleotide sequence described herein comprises, consists of, or consists essentially of modified RNAs. In some embodiments, the modified RNAs are selected from a 2′-O-methyl RNA and 2′-fluoro RNA. In some embodiments, 15, 16, 17, 18, 19, 20, 21, 22, or 23 modified nucleotides of any sense or antisense nucleotide sequence described herein are independently selected from 2′-O-methyl RNA and 2′-fluoro RNA.

[0136] In some embodiments, the siRNA molecules disclosed herein include end modifications at the 5′ end and/or the 3′ end of the sense strand and/or the antisense strand. In some embodiments, the siRNA molecules disclosed herein comprise a phosphate moiety at the 5′ end of the sense strand and/or antisense strand. In some embodiments, the 5′ end of the sense strand and/or antisense strand comprises a phosphate mimic or analogue (e.g., “5′ terminal phosphate mimic”). In some embodiments, the 5′ end of the sense strand and/or antisense strand comprises a vinyl phosphonate or a variation thereof (e.g., “5′ terminal vinyl phosphonate”).

[0137] In some embodiments, the siRNA molecules comprise at least one backbone modification, such as a modified internucleoside linkage. In some embodiments, the siRNA molecules described herein comprise at least one phosphorothioate internucleoside linkage. In particular embodiments, the phosphorothioate internucleoside linkages may be positioned at the 3′ or 5′ ends of the sense and/or antisense strands.

[0138] In some embodiments, siRNA molecules include an overhang of at least one unpaired nucleotide. In some embodiments in which the siRNA molecule comprises a nucleotide overhang, two or more of the unpaired nucleotides in the overhang can be connected by a phosphorothioate internucleoside linkage. In certain embodiments, all the unpaired nucleotides in a nucleotide overhang at the 3′ end of the antisense strand and/or the sense strand are connected by phosphorothioate internucleoside linkages. In some embodiments, all the unpaired nucleotides in a nucleotide overhang at the 5′ end of the antisense strand and/or the sense strand are connected by phosphorothioate internucleoside linkages. In some embodiments, all of the unpaired nucleotides in any nucleotide overhang are connected by phosphorothioate internucleoside linkages.

[0139] In some embodiments, the sense or the antisense strand may further comprise at least 1, 2, 3, 4, 5, 6, 7, 8, 9, 10, 11, 12, 13, 14, or 15 or more phosphorothioate internucleoside linkages. In some embodiments, the sense strand comprises 20, 19, 18, 17, 16, 15, 14, 13, 12, 11, 10, 9, 8, 7, 6, 5, 4, or 3 or fewer phosphorothioate internucleoside linkages. In some embodiments, the sense strand comprises 2 to 10, 2 to 8, 2 to 6, 1 to 5, 1 to 4, 1 to 3, or 1 to 2 phosphorothioate internucleoside linkages. In some embodiments, the sense strand comprises 1 to 2 phosphorothioate internucleoside linkages. In some embodiments, the sense strand comprises 2 to 4 phosphorothioate internucleoside linkages. In some embodiments, at least one phosphorothioate internucleoside linkage is between the nucleotides at positions 1 and 2 from the 5′ end of any sense or antisense nucleotide sequences described herein. In some embodiments, at least one phosphorothioate internucleoside linkage is between the nucleotides at positions 2 and 3 from the 5′ end of any sense or antisense nucleotide sequences described herein. In some embodiments, the sense strand comprises two phosphorothioate internucleoside linkages between the nucleotides at positions 1 to 3 from the 5′ end of any sense or antisense nucleotide sequences described herein.

[0140] In some embodiments, the modified nucleotides that can be incorporated into the siRNA molecules of the disclosure may have more than one chemical modification described herein. For instance, in some embodiments, the modified nucleotide may have a modification to the ribose sugar as well as a modification to the phosphodiester backbone. By way of example, a modified nucleotide may comprise a 2′ sugar modification (e.g., 2′-fluoro or 2′-O-methyl) and a modification to the 5′ phosphate that would create a modified internucleoside linkage when the modified nucleotide was incorporated into a polynucleotide. For instance, in some embodiments, the modified nucleotide may comprise a sugar modification, such as a 2′-fluoro modification or a 2′-O-methyl modification, for example, as well as a 5′ phosphorothioate group. In some embodiments, the sense and/or antisense strand of the siRNA molecules of the disclosure comprises a combination of 2′ modified nucleotides and phosphorothioate internucleoside linkages. In some embodiments, the sense and/or antisense strand of the siRNA molecules of the disclosure comprises a combination of 2′ sugar modifications, phosphorothioate internucleoside linkages, and 5′ terminal vinyl phosphonate.

[0141] In some embodiments, any of the siRNAs disclosed herein comprise 1, 2, 3, 4, 5, 6, 7, 8, 9, 10, 11, 12, 13, 14, 15, 16, 17, 18, 19, 20, 21, 22, 23, 24, 25, or more modified nucleotides. In some embodiments, any of the siRNAs disclosed herein comprise 1 or more modified nucleotides. In some embodiments, any of the siRNAs disclosed herein comprise 2 or more modified nucleotides. In some embodiments, any of the siRNAs disclosed herein comprise 5 or more modified nucleotides. In some embodiments, any of the siRNAs disclosed herein comprise 8 or more modified nucleotides. In some embodiments, any of the siRNAs disclosed herein comprise 10 or more modified nucleotides. In some embodiments, any of the siRNAs disclosed herein comprise 15 or more modified nucleotides. In some embodiments, any of the siRNAs disclosed herein comprise 20 or more modified nucleotides. In some embodiments, any of the siRNAs disclosed herein comprise 30 or more modified nucleotides. In some embodiments, any of the siRNAs disclosed herein comprise 35 or more modified nucleotides. In some embodiments, any of the siRNAs disclosed herein comprise 40 or more modified nucleotides. In some embodiments, any of the siRNAs disclosed herein comprise 45 or more modified nucleotides. In some embodiments, all of the nucleotides in the siRNA molecule are modified nucleotides. In some embodiments, the one or more modified nucleotides is independently selected from a 2′-O-methyl nucleotide, a 2′-fluoro nucleotide, a locked nucleic acid, a nucleoside analog, a 5′ terminal vinyl phosphonate, and a 5′ phosphorothioate.

[0142] In some embodiments, any of the sense strands disclosed herein comprise 1, 2, 3, 4, 5, 6, 7, 8, 9, 10, 11, 12, 13, 14, 15, 16, 17, 18, 19, 20, 21, 22, 23, 24, 25, or more modified nucleotides. In some embodiments, any of the sense strands disclosed herein comprise 1 or more modified nucleotides. In some embodiments, any of the sense strands disclosed herein comprise 2 or more modified nucleotides. In some embodiments, any of the sense strands disclosed herein comprise 5 or more modified nucleotides. In some embodiments, any of the sense strands disclosed herein comprise 8 or more modified nucleotides. In some embodiments, any of the sense strands disclosed herein comprise 10 or more modified nucleotides. In some embodiments, any of the sense strands disclosed herein comprise 15 or more modified nucleotides. In some embodiments, any of the sense strands disclosed herein comprise 17 or more modified nucleotides. In some embodiments, any of the sense strands disclosed herein comprise 18 or more modified nucleotides. In some embodiments, any of the sense strands disclosed herein comprise 19 or more modified nucleotides. In some embodiments, any of the sense strands disclosed herein comprise 20 or more modified nucleotides. In some embodiments, any of the sense strands disclosed herein comprise 21 or more modified nucleotides. In some embodiments, all of the nucleotides in the sense strand are modified nucleotides. In some embodiments, the one or more modified nucleotides is independently selected from a 2′-O-methyl nucleotide, a 2′-fluoro nucleotide, a locked nucleic acid, a nucleoside analog, a 5′ terminal vinyl phosphonate, and a 5′ phosphorothioate.

[0143] In some embodiments, any of the antisense strands disclosed herein comprise 1, 2, 3, 4, 5, 6, 7, 8, 9, 10, 11, 12, 13, 14, 15, 16, 17, 18, 19, 20, 21, 22, 23, 24, 25, or more modified nucleotides. In some embodiments, any of the antisense strands disclosed herein comprise 1 or more modified nucleotides. In some embodiments, any of the antisense strands disclosed herein comprise 2 or more modified nucleotides. In some embodiments, any of the antisense strands disclosed herein comprise 5 or more modified nucleotides. In some embodiments, any of the antisense strands disclosed herein comprise 8 or more modified nucleotides. In some embodiments, any of the antisense strands disclosed herein comprise 10 or more modified nucleotides. In some embodiments, any of the antisense strands disclosed herein comprise 15 or more modified nucleotides. In some embodiments, any of the antisense strands disclosed herein comprise 17 or more modified nucleotides. In some embodiments, any of the antisense strands disclosed herein comprise 18 or more modified nucleotides. In some embodiments, any of the antisense strands disclosed herein comprise 19 or more modified nucleotides. In some embodiments, any of the antisense strands disclosed herein comprise 20 or more modified nucleotides. In some embodiments, any of the antisense strands disclosed herein comprise 21 or more modified nucleotides. In some embodiments, any of the antisense strands disclosed herein comprise 22 or more modified nucleotides. In some embodiments, any of the antisense strands disclosed herein comprise 23 or more modified nucleotides. In some embodiments, all of the nucleotides in the antisense strand are modified nucleotides. In some embodiments, the one or more modified nucleotides is independently selected from a 2′-O-methyl nucleotide, a 2′-fluoro nucleotide, a locked nucleic acid, a nucleoside analog, a 5′ terminal vinyl phosphonate, and a 5′ phosphorothioate.

[0144] In some embodiments, at least about 10%, 20%, 30%, 40%, 45%, 50%, 55%, 60%, 65%, 70%, 75%, 80%, 90%, 95%, or 100% of the nucleotides in any of the sense strands disclosed herein are modified nucleotides. In some embodiments, at least about 10% of the nucleotides in any of the sense strands disclosed herein are modified nucleotides. In some embodiments, at least about 30% of the nucleotides in any of the sense strands disclosed herein are modified nucleotides. In some embodiments, at least about 50% of the nucleotides in any of the sense strands disclosed herein are modified nucleotides. In some embodiments, at least about 60% of the nucleotides in any of the sense strands disclosed herein are modified nucleotides. In some embodiments, at least about 70% of the nucleotides in any of the sense strands disclosed herein are modified nucleotides. In some embodiments, at least about 80% of the nucleotides in any of the sense strands disclosed herein are modified nucleotides. In some embodiments, at least about 90% of the nucleotides in any of the sense strands disclosed herein are modified nucleotides. In some embodiments, at least about 100% of the nucleotides in any of the sense strands disclosed herein are modified nucleotides. In some embodiments, the one or more modified nucleotides is independently selected from a 2′-O-methyl nucleotide, a 2′-fluoro nucleotide, a locked nucleic acid, a nucleoside analog, a 5′ terminal vinyl phosphonate, and a 5′ phosphorothioate.

[0145] In some embodiments, at least about 10%, 20%, 30%, 40%, 45%, 50%, 55%, 60%, 65%, 70%, 75%, 80%, 90%, 95%, or 100% of the nucleotides in any of the antisense strands disclosed herein are modified nucleotides. In some embodiments, at least about 10% of the nucleotides in any of the antisense strands disclosed herein are modified nucleotides. In some embodiments, at least about 30% of the nucleotides in any of the antisense strands disclosed herein are modified nucleotides. In some embodiments, at least about 50% of the nucleotides in any of the antisense strands disclosed herein are modified nucleotides. In some embodiments, at least about 60% of the nucleotides in any of the antisense strands disclosed herein are modified nucleotides. In some embodiments, at least about 70% of the nucleotides in any of the antisense strands disclosed herein are modified nucleotides. In some embodiments, at least about 80% of the nucleotides in any of the antisense strands disclosed herein are modified nucleotides. In some embodiments, at least about 90% of the nucleotides in any of the antisense strands disclosed herein are modified nucleotides. In some embodiments, at least about 100% of the nucleotides in any of the antisense strands disclosed herein are modified nucleotides. In some embodiments, the one or more modified nucleotides is independently selected from a 2′-O-methyl nucleotide, a 2′-fluoro nucleotide, a locked nucleic acid, a nucleoside analog, a 5′ terminal vinyl phosphonate, and a 5′ phosphorothioate.

siRNA Conjugates

[0146] In some embodiments, the siRNA molecules disclosed herein may comprise one or more conjugates or ligands. As used herein, a “conjugate” or “ligand” refers to any compound or molecule that is capable of interacting with another compound or molecule, directly or indirectly. In some embodiments, the ligand may modify one or more properties of the siRNA molecule to which it is attached, such as the pharmacodynamic, pharmacokinetic, binding, absorption, cellular distribution, cellular uptake, charge and/or clearance properties of the siRNA molecule. Non-limiting examples of such conjugates are described, e.g., in WO 2020/243490; WO 2020/097342; WO 2021/119325; PCT/US2021/019629; PCT/US2021/019628; PCT/US2021/021199; Sig. Transduct. Target Ther. 5 (101), 2020; ACS Chem. Biol. 10 (5), 1181-1187, 2015; J. Am. Chem. Soc. 136 (49), 16958-16961, 2014; Nucleic Acids Res. 42 (13), 8796-8807, 2014; Molec. Ther. 28 (8), 1759-1771, 2020; and Nucleic Acid Ther. 28 (3), 109-118, 2018, each of which is incorporated by reference herein.

[0147] In some embodiments, the ligand may be attached to the 5′ end and/or the 3′ end of the sense and/or antisense strand of the siRNA via covalent attachment such as to a nucleotide. In some embodiments, the ligand is covalently attached via a linker to the sense or antisense strand of the siRNA molecule. The ligand can be attached to nucleobases, sugar moieties, or internucleoside linkages of polynucleotides (e.g., sense strand or antisense strand) of the siRNA molecules of the disclosure.

[0148] In some embodiments, the type of conjugate or ligand used and the extent of conjugation of siRNA molecules of the disclosure can be evaluated, for example, for improved pharmacokinetic profiles, bioavailability, and/or stability of siRNA molecules while at the same time maintaining the ability of the siRNA to mediate RNAi activity. In some embodiments, a conjugate or ligand alters the distribution, targeting or lifetime of a siRNA molecule into which it is incorporated. In some embodiments, a conjugate or ligand provides an enhanced affinity for a selected target, e.g., molecule, cell or cell type, compartment (e.g., a cellular or organ compartment), tissue, organ or region of the body, as, e.g., compared to a molecule absent such a ligand.

[0149] In some embodiments, a conjugate or ligand can include a naturally occurring substance or a recombinant or synthetic molecule. Non-limiting examples of conjugates and ligands include serum proteins (e.g., human serum albumin, low-density lipoprotein, globulin), cholesterol moieties, vitamins (e.g., biotin, vitamin E, vitamin B12), folate moieties, steroids, bile acids (e.g., cholic acid), fatty acids (e.g., palmitic acid, myristic acid), carbohydrates (e.g., a dextran, pullulan, chitin, chitosan, inulin, cyclodextrin, hyaluronic acid, or N-acetyl-galactosamine (GalNAc)), glycosides, phospholipids, antibodies or binding fragment thereof (e.g., antibody or binding fragment that targets the siRNA to a specific cell type, such as liver), a dyes, intercalating agents (e.g., acridines), cross-linkers (e.g., psoralene, mitomycin C), porphyrins (TPPC4, texaphyrin, Sapphyrin), polycyclic aromatic hydrocarbons (e.g., phenazine, dihydrophenazine), artificial endonucleases (e.g., EDTA), lipophilic molecules (e.g., cholesterol, tocopherol, long fatty acids (e.g., docosanoic, palmitoyl, docosahexaenoic), cholic acid, adamantane acetic acid, 1-pyrene butyric acid, dihydrotestosterone, 1,3-BisO (hexadecyl)glycerol, geranyloxyhexyl group, hexadecylglycerol, borneol, menthol, 1,3-propanediol, heptadecyl group, 03-(oleoyl) lithocholic acid, 03-(oleoyl) cholenic acid, dimethoxytrityl, or phenoxazine), peptides (e.g., antennapedia peptide, Tat peptide, RGD peptides), alkylating agents, polymers, such as polyethylene glycol (PEG) (e.g., PEG-40K), poly amino acids, polyamines (e.g., spermine, spermidine), alkyls, substituted alkyls, radiolabeled markers, enzymes, haptens (e.g., biotin), transport/absorption facilitators (e.g., aspirin, vitamin E, folic acid), synthetic ribonucleases (e.g., imidazole, bisimidazole, histamine, imidazole clusters, acridine-imidazole conjugates, Eu3+ complexes of tetraazamacrocycles), dinitrophenyl, HRP, or AP.

[0150] In some embodiments, the conjugate or ligand comprises a carbohydrate. Carbohydrates include, but are not limited to, sugars (e.g., monosaccharides, disaccharides, trisaccharides, tetrasaccharides, and oligosaccharides containing from about 4, 5, 6, 7, 8, or 9 monosaccharide units) and polysaccharides, such as starches, glycogen, cellulose and polysaccharide gums. In some embodiments, the carbohydrate incorporated into the ligand is a monosaccharide selected from a pentose, hexose, or heptose and di- and tri-saccharides including such monosaccharide units.

[0151] In some embodiments, the carbohydrate incorporated into the conjugate or ligand is an amino sugar, such as galactosamine, glucosamine, N-acetyl-galactosamine (GalNAc), and N-acetyl-glucosamine. In some embodiments, the conjugate or ligand comprises N-acetyl-galactosamine and derivatives thereof. Non-limiting examples of GalNAc- or galactose-containing ligands that can be incorporated into the siRNAs of the disclosure are described in WO 2020/243490; WO 2020/097342; WO 2021/119325; PCT/US2021/019629; PCT/US2021/019628; PCT/US2021/021199; Sig. Transduct. Target Ther. 5 (101), 1-25, 2020; ACS Chem. Biol. 10 (5), 1181-1187, 2015; J. Am. Chem. Soc. 136 (49), 16958-16961, 2014; Nucleic Acids Res. 42 (13), 8796-8807, 2014; Molec. Ther. 28 (8), 1759-1771, 2020; and Nucleic Acid Ther. 28 (3), 109-118, 2018, all of which are hereby incorporated herein by reference in their entireties.

[0152] The conjugate or ligand can be attached or conjugated to the siRNA molecule directly or indirectly. For instance, in some embodiments, the ligand is covalently attached directly to the sense or antisense strand of the siRNA molecule. In other embodiments, the ligand is covalently attached via a linker to the sense or antisense strand of the siRNA molecule. The ligand can be attached to nucleobases, sugar moieties, or internucleoside linkages of polynucleotides (e.g. sense strand or antisense strand) of the siRNA molecules of the disclosure. In some embodiments, the conjugate or ligand may be attached to the 5′ end and/or to the 3′ end of the sense and/or antisense strand of the siRNA molecule. In certain embodiments, the ligand is covalently attached to the 5′ end of the sense strand. In some embodiments, the ligand is covalently attached to the 3′ end of the sense strand. In some embodiments, the ligand is attached to the 5′ terminal nucleotide of the sense strand or the 3′ terminal nucleotide of the sense strand.

[0153] In some embodiments, the conjugate or ligand covalently attached to the sense and/or antisense strand of the siRNA molecule comprises a GalNAc derivative. In some embodiments, the GalNAc derivative is attached to the 5′ end and/or to the 3′ end of the sense and/or antisense strand of the siRNA molecule. In some embodiments, the GalNAc derivative is attached to the 3′ end of the sense strand. In some embodiments, the GalNAc derivative is attached to the 5′ end of the sense strand. In some embodiments, the GalNAc derivative is attached to the 3′ end of the antisense strand. In some embodiments, the GalNAc derivative is attached to the 5′ end of the antisense strand. In some embodiments, the GalNAc derivative is attached to the 5′ end of the sense strand and to the 3′ end of the sense strand.

[0154] In some embodiments, the conjugate or ligand is a GalNAc derivative comprising 1, 2, 3, 4, 5, or 6 monomeric GalNAc units. In some embodiments, the conjugate or ligand is a GalNAc derivative comprising 1 monomeric GalNAc units. In some embodiments, the conjugate or ligand is a GalNAc derivative comprising 2 monomeric GalNAc units. In some embodiments, the conjugate or ligand is a GalNAc derivative comprising 3 monomeric GalNAc units. In some embodiments, the conjugate or ligand is a GalNAc derivative comprising 4 monomeric GalNAc units. In some embodiments, the conjugate or ligand is a GalNAc derivative comprising 5 monomeric GalNAc units. In some embodiments, the conjugate or ligand is a GalNAc derivative comprising 6 monomeric GalNAc units. In some embodiments, a various amounts of monomeric GalNAc units are attached at the 5′ end and the 3′ end of the sense strand. In some embodiments, a various amounts of monomeric GalNAc units are attached at the 5′ end and the 3′ end of the antisense strand. In some embodiments, 1, 2, 3, 4, 5, or 6 monomeric GalNAc units are attached at the 5′ end of the sense strand. In some embodiments, 1, 2, 3, 4, 5, or 6 monomeric GalNAc units are attached at the 3′ end of the sense strand. In some embodiments, 1, 2, 3, 4, 5, or 6 monomeric GalNAc units are attached at the 5′ end of the antisense strand. In some embodiments, 1, 2, 3, 4, 5, or 6 monomeric GalNAc units are attached at the 3′ end of the antisense strand. In some embodiments, the same number of monomeric GalNAc units are attached at both the 5′ end and the 3′ end of the sense strand. In some embodiments, the same number of monomeric GalNAc units are attached at both the 5′ end and the 3′ end of the antisense strand. In some embodiments, different number of monomeric GalNAc units are attached at the 5′ end and the 3′ end of the sense strand. In some embodiments, different number of monomeric GalNAc units are attached at the 5′ end and the 3′ end of the antisense strand.

[0155] In some embodiments, the double stranded siRNA molecule of any one of siRNA Duplex ID Nos. ds-siNA D1-D178 or mds-siNA MD1-MD178, further comprises a GalNAc derivative attached to the 5′ end and/or to the 3′ end of the sense and/or antisense strand of the siRNA molecule. In some embodiments, the double stranded siRNA molecule selected from any one of the siRNA Duplexes of Table 8 or Table 9 or Table 10 or Table 11 or Table 12 further comprises a GalNAc derivative attached to the 5′ end and/or to the 3′ end of the sense and/or antisense strand of the siRNA molecule.

### HSD17B13

[0156] In some embodiments, any of the siRNAs disclosed herein specifically downregulate expression of HSD17B13 gene or a variant thereof. In some embodiments, any of the siRNAs disclosed herein specifically downregulate expression of HSD17B13 gene or a variant thereof in a cell by at least about 10%, 15%, 20%, 25%, 30%, 35%, 40%, 45%, 50%, 55%, 60%, 65%, 70%, 75%, 80%, 85%, 90%, 95%, or 100%, wherein the percent of downregulation of expression is compared to a cell not contacted with the siRNA. In some embodiments, any of the siRNAs disclosed herein specifically downregulate expression of HSD17B13 gene or a variant thereof in a cell by at least about 30%, wherein the percent of downregulation of expression is compared to a cell not contacted with the siRNA. In some embodiments, any of the siRNAs disclosed herein specifically downregulate expression of HSD17B13 gene or a variant thereof in a cell by at least about 50%, wherein the percent of downregulation of expression is compared to a cell not contacted with the siRNA. In some embodiments, any of the siRNAs disclosed herein specifically downregulate expression of HSD17B13 gene or a variant thereof in a cell by at least about 60%, wherein the percent of downregulation of expression is compared to a cell not contacted with the siRNA. In some embodiments, any of the siRNAs disclosed herein specifically downregulate expression of HSD17B13 gene or a variant thereof in a cell by at least about 70%, wherein the percent of downregulation of expression is compared to a cell not contacted with the siRNA. In some embodiments, any of the siRNAs disclosed herein specifically downregulate expression of HSD17B13 gene or a variant thereof in a cell by at least about 75%, wherein the percent of downregulation of expression is compared to a cell not contacted with the siRNA. In some embodiments, any of the siRNAs disclosed herein specifically downregulate expression of HSD17B13 gene or a variant thereof in a cell by at least about 80%, wherein the percent of downregulation of expression is compared to a cell not contacted with the siRNA. In some embodiments, any of the siRNAs disclosed herein specifically downregulate expression of HSD17B13 gene or a variant thereof in a cell by at least about 85%, wherein the percent of downregulation of expression is compared to a cell not contacted with the siRNA. In some embodiments, any of the siRNAs disclosed herein specifically downregulate expression of HSD17B13 gene or a variant thereof in a cell by at least about 90%, wherein the percent of downregulation of expression is compared to a cell not contacted with the siRNA. In some embodiments, any of the siRNAs disclosed herein specifically downregulate expression of HSD17B13 gene or a variant thereof in a cell by at least about 95%, wherein the percent of downregulation of expression is compared to a cell not contacted with the siRNA. In some embodiments, any of the siRNAs disclosed herein specifically downregulate expression of HSD17B13 gene or a variant thereof in a cell by at least about 100%, wherein the percent of downregulation of expression is compared to a cell not contacted with the siRNA.

[0157] The expression of HSD17B13 gene is measured by any method known in the art. Exemplary methods for measuring expression of HSD17B13 gene include, but are not limited to, quantitative PCR, RT-PCR, RT-qPCR, western blot, Southern blot, northern blot, FISH, DNA microarray, tiling array, and RNA-Seq. The expression of the HSD17B13 gene may be assessed, for example, based on the level, or the change in the level, of any variable associated with HSD17B13 gene expression, e.g., HSD17B13 mRNA level, HSD17B13 protein level, and/or the number or extent of amyloid deposits. This level may be assessed, for example, in an individual cell or in a group of cells, including, for example, a sample derived from a subject. In some embodiments, downregulation or inhibition may be assessed by a decrease in an absolute or relative level of one or more variables that are associated with HSD17B13 expression compared with a control level. The control level may be any type of control level that is utilized in the art, e.g., a pre-dose baseline level, or a level determined from a similar subject, cell, or sample that is untreated or treated with a control (such as, e.g., buffer only control or inactive or attenuated agent control).

[0158] In some embodiments, the HSD17B13 gene comprises a nucleotide sequence that is at least about 80%, 85%, 90%, 91%, 92%, 93%, 94%, 95%, 96%, 97%, 98%, 99%, or 100% identical to the nucleotide sequence of SEQ ID NO: 1 across the full-length of SEQ ID NO: 261 (GenBank Accession No. NM_178135.5 (nucleotides 42 to 944)).

[0159] In some embodiments, the HSD17B13 gene comprises a nucleotide sequence having less than or equal to 1, 2, 3, 4, 5, 6, 7, 8, 9, 10, 11, 12, 13, 14, 15, 16, 17, 18, 19, or 20 nucleotide mismatches to the nucleotide sequence of SEQ ID NO: 261 across the full-length of SEQ ID NO: 261.

[0160] In some embodiments, the fragment of the HSD17B13 gene is about 10 to about 50, or about 15 to about 50, or about 15 to about 45 nucleotides, or about 15 to about 40, or about 15 to about 35, or about 15 to about 30, or about 15 to about 25, or about 17 to about 23 nucleotides, or about 17 to about 22, or about 17 to about 21, or about 18 to about 23, or about 18 to about 22, or about 18 to about 21, or about 19 to about 23, or about 19 to about 22, or about 19 to about 21 nucleotides in length.

Administration of siRNA

[0161] Administration of any of the siRNAs disclosed herein may be conducted by methods known in the art, including as described below. The siRNAs of the present disclosure may be given systemically or locally, for example, orally, nasally, parenterally, topically, intracisternally, intravaginally, or rectally, and are given in forms suitable for each administration route.

[0162] The delivery of a siRNA molecule of the disclosure to a cell, e.g., a cell within a subject, such as a human subject (e.g., a subject in need thereof, including a subject having a disease, disorder or condition associated with HSD17B13 gene expression) can be achieved in a number of different ways. For example, in some embodiments, delivery may be performed by contacting a cell with a siRNA of the disclosure either in vitro, in vivo, or ex vivo. In some embodiments, in vivo delivery may be performed, for example, by administering a pharmaceutical composition comprising a siRNA molecule to a subject. In some embodiments, in vivo delivery may be performed by administering one or more vectors that encode and direct the expression of the siRNA.

[0163] In general, any method of delivering a nucleic acid molecule (in vitro, in vivo, or ex vivo) can be adapted for use with a siRNA molecule of the disclosure. For in vivo delivery, factors to consider in order to deliver a siRNA molecule include, for example, biological stability of the delivered molecule, prevention of non-specific effects, and accumulation of the delivered molecule in the target tissue and non-target tissue.

[0164] In some embodiments, the non-specific effects of a siRNA can be minimized by local administration, for example, by direct injection or implantation into a tissue or topically administering the preparation. Local administration to a treatment site can, for example, maximize the local concentration of the agent, limit the exposure of the agent to systemic tissues that can otherwise be harmed by the agent or that can degrade the agent, and permit a lower total dose of the siRNA molecule to be administered.

[0165] In some embodiments, the siRNAs or pharmaceutical compositions comprising the siRNAs of the disclosure can be locally administered to relevant tissues ex vivo, or in vivo through, for example, injection, infusion pump or stent, with or without their incorporation in biopolymers.

[0166] For administering a siRNA for the treatment of a disease, the siRNA can be modified or alternatively delivered using a drug delivery system; both methods can act, for example, to prevent the rapid degradation of the dsRNA by endo- and exo-nucleases in vivo. Modification of the siRNA or the pharmaceutical carrier can also permit targeting of the siRNA composition to the target tissue and avoid undesirable off-target effects. For example, siRNA molecules can be modified by conjugation to lipophilic groups such as cholesterol as described above to, e.g., enhance cellular uptake and prevent degradation.

[0167] In some embodiments, the siRNA can be delivered using drug delivery systems such as a nanoparticle, a dendrimer, a polymer, liposomes, or a cationic delivery system. Positively charged cationic delivery systems can facilitate binding of a siRNA molecule (negatively charged) and also enhance interactions at the negatively charged cell membrane to permit efficient uptake of a siRNA by the cell. In some embodiments, cationic lipids, dendrimers, or polymers can either be bound to a siRNA, or induced to form a vesicle or micelle that encases a siRNA. The formation of vesicles or micelles may further prevent degradation of the siRNA when administered systemically, for example.

[0168] Some non-limiting examples of drug delivery systems useful for systemic delivery of siRNAs include DOTAP, cardiolipin, polyethyleneimine, Arg-Gly-Asp (RGD) peptides, and polyamidoamines. In some embodiments, a siRNA forms a complex with cyclodextrin for systemic administration.

### Pharmaceutical Compositions

[0169] The siRNA molecules of the disclosure can be administered to animals, including to mammals, and in particular to humans, as pharmaceuticals by themselves, in mixtures with one another, and/or in the form of pharmaceutical compositions.

[0170] The present disclosure includes pharmaceutical compositions and formulations which include the siRNA molecules of the disclosure. In some embodiments, a siRNA molecule of the disclosure may be administered in a pharmaceutical composition. In some embodiments, the pharmaceutical compositions of the disclosure comprise one or more siRNA molecules of the disclosure and a pharmaceutically acceptable carrier. When reference is made in the present disclosure to a siRNA molecule, it is to be understood that reference is also made to a pharmaceutical composition containing the siRNA molecule, if appropriate.

[0171] In some embodiments, the pharmaceutical composition comprises at least 1, 2, 3, 4, 5, 6, 7, 8, 9, 10, 11, 12, 13, 14, 15, 16, 17, 18, 19, or 20 or more of any of the siRNA molecules disclosed herein.

[0172] In some embodiments, any of the pharmaceutical compositions disclosed herein comprise one or more excipients, carriers, wetting agents, diluents, emulsifiers, lubricants, coloring agents, release agents, coating agents, sweetening, flavoring and perfuming agents, preservatives and antioxidants.

[0173] In some embodiments, a siRNA molecule of the disclosure may be administered in “naked” form, where the modified or unmodified siRNA molecule is directly suspended in aqueous or suitable buffer solvent, as a “free siRNA.” The free siRNA may be in a suitable buffer solution, which may comprise, for example, acetate, citrate, prolamine, carbonate, or phosphate, or any combination thereof. In one embodiment, the buffer solution is phosphate buffered saline (PBS). The pH and osmolality of the buffer solution containing the siRNA can be adjusted such that it is suitable for administering to a subject.

[0174] Examples of pharmaceutically-acceptable antioxidants include, but are not limited to: (1) water soluble antioxidants, such as ascorbic acid, cysteine hydrochloride, sodium bisulfate, sodium metabisulfite, sodium sulfite and the like; (2) oil-soluble antioxidants, such as ascorbyl palmitate, butylated hydroxyanisole (BHA), butylated hydroxytoluene (BHT), lecithin, propyl gallate, alpha-tocopherol, and the like; and (3) metal chelating agents, such as citric acid, ethylenediamine tetraacetic acid (EDTA), sorbitol, tartaric acid, phosphoric acid, and the like.

[0175] In certain embodiments, a pharmaceutical composition of the present disclosure comprises an excipient selected from the group consisting of cyclodextrins, celluloses, liposomes, micelle forming agents, e.g., bile acids, and polymeric carriers, e.g., polyesters and polyanhydrides; and a compound (e.g., siRNA molecule) of the present disclosure. In certain embodiments, an aforementioned composition renders orally bioavailable a siRNA molecule of the present disclosure.

[0176] Methods of preparing these formulations or pharmaceutical compositions include, for example, the step of bringing into association a siRNA molecule of the present disclosure with the carrier and, optionally, one or more accessory ingredients. In general, the formulations are prepared by uniformly and intimately bringing into association a siRNA molecule of the present disclosure with liquid carriers, or finely divided solid carriers, or both, and then, if necessary, shaping the product.

[0177] Administration of the pharmaceutical compositions of the present disclosure may be via any common route, and they are given in forms suitable for each administration route. Such routes include, but are not limited to, parenteral (e.g., subcutaneous, intramuscular, intraperitoneal or intravenous), oral, nasal, airway (e.g., aerosol), buccal, intradermal, transdermal, sublingual, rectal, and vaginal. In some embodiments, administration is by direct injection into liver tissue or delivery through the hepatic portal vein. In some embodiments, the pharmaceutical composition is administered orally. In some embodiments, the pharmaceutical composition is administered parenterally. In some embodiments, the compositions are administered by subcutaneous or intravenous infusion or injection. In some embodiments, the pharmaceutical composition is administered subcutaneously.

[0178] Pharmaceutical compositions of the disclosure suitable for oral administration may be, for example, in the form of capsules (e.g., hard or soft capsules), cachets, pills, tablets, lozenges (using a flavored basis, usually, e.g., sucrose and acacia or tragacanth), powders, granules, or as a solution or a suspension in an aqueous or non-aqueous liquid, or as an oil-in-water or water-in-oil liquid emulsion, or as an elixir or syrup, or as pastilles (using an inert base, such as gelatin and glycerin, or sucrose and acacia) and/or as mouth washes and the like, each containing a predetermined amount of a siRNA molecule of the present disclosure as an active ingredient. A siRNA molecule of the present disclosure may also be administered as a bolus, electuary or paste.

[0179] In solid dosage forms of the disclosure for oral administration (capsules, tablets, pills, dragees, powders, granules, trouches and the like), the active ingredient is mixed with one or more pharmaceutically-acceptable carriers, such as, for example, sodium citrate or dicalcium phosphate, and/or any of the following: (1) fillers or extenders, such as starches, lactose, sucrose, glucose, mannitol, and/or silicic acid; (2) binders, such as, for example, carboxymethylcellulose, alginates, gelatin, polyvinyl pyrrolidone, sucrose and/or acacia; (3) humectants, such as glycerol; (4) disintegrating agents, such as agar-agar, calcium carbonate, potato or tapioca starch, alginic acid, certain silicates, and sodium carbonate; (5) solution retarding agents, such as paraffin; (6) absorption accelerators, such as quaternary ammonium compounds and surfactants, such as poloxamer and sodium lauryl sulfate; (7) wetting agents, such as, for example, cetyl alcohol, glycerol monostearate, and non-ionic surfactants; (8) absorbents, such as kaolin and bentonite clay; (9) lubricants, such as talc, calcium stearate, magnesium stearate, solid polyethylene glycols, sodium lauryl sulfate, zinc stearate, sodium stearate, stearic acid, and mixtures thereof; (10) coloring agents; and (11) controlled release agents such as crospovidone or ethyl cellulose.

[0180] In the case of capsules, tablets and pills, the pharmaceutical compositions may also comprise buffering agents. Solid compositions of a similar type may also be employed as fillers in soft and hard-shelled gelatin capsules using such excipients as lactose or milk sugars, as well as high molecular weight polyethylene glycols and the like.

[0181] A tablet may be made, for example, by compression or molding, optionally with one or more accessory ingredients. Compressed tablets may be prepared, for example, using binder (for example, gelatin or hydroxypropylmethyl cellulose), lubricant, inert diluent, preservative, disintegrant (for example, sodium starch glycolate or cross-linked sodium carboxymethyl cellulose), surface-active or dispersing agent. Molded tablets may be made, for example, by molding in a suitable machine a mixture of the powdered compound moistened with an inert liquid diluent.

[0182] The tablets, and other solid dosage forms of the pharmaceutical compositions of the present disclosure, such as dragees, capsules, pills and granules, may optionally be scored or prepared with coatings and shells, such as enteric coatings and other coatings well known in the pharmaceutical-formulating art. They may also be formulated so as to provide slow or controlled release of the active ingredient therein using, for example, hydroxypropylmethyl cellulose in varying proportions to provide the desired release profile, other polymer matrices, liposomes and/or microspheres. They may be formulated for rapid release, e.g., freeze-dried.

[0183] They may be sterilized by, for example, filtration through a bacteria-retaining filter, or by incorporating sterilizing agents in the form of sterile solid compositions which can be dissolved in sterile water, or some other sterile injectable medium immediately before use. These compositions may also optionally contain opacifying agents and may be of a composition that they release the active ingredient(s) only, or preferentially, in a certain portion of the gastrointestinal tract, optionally, in a delayed manner. Examples of embedding compositions which can be used include polymeric substances and waxes. The active ingredient can also be in micro-encapsulated form, if appropriate, with one or more of the above-described excipients.

[0184] Liquid dosage forms for oral administration of the siRNA molecules of the disclosure include, for example, pharmaceutically acceptable emulsions, microemulsions, solutions, suspensions, syrups and elixirs. In addition to the active ingredient, the liquid dosage forms may contain inert diluents commonly used in the art, such as, for example, water or other solvents, solubilizing agents and emulsifiers, such as ethyl alcohol, isopropyl alcohol, ethyl carbonate, ethyl acetate, benzyl alcohol, benzyl benzoate, propylene glycol, 1,3-butylene glycol, oils (e.g., cottonseed, groundnut, corn, germ, olive, castor and sesame oils), glycerol, tetrahydrofuryl alcohol, polyethylene glycols and fatty acid esters of sorbitan, and mixtures thereof.

[0185] Besides inert diluents, the oral compositions can also include adjuvants such as, for example, wetting agents, emulsifying and suspending agents, sweetening, flavoring, coloring, perfuming and preservative agents.

[0186] Suspensions, in addition to the siRNA molecules, may contain suspending agents as, for example, ethoxylated isostearyl alcohols, polyoxyethylene sorbitol and sorbitan esters, microcrystalline cellulose, aluminum metahydroxide, bentonite, agar-agar and tragacanth, and mixtures thereof.

[0187] Formulations of the pharmaceutical compositions of the disclosure for rectal or vaginal administration may be presented as a suppository, which may be prepared by mixing one or more siRNA molecules of the disclosure with one or more suitable nonirritating excipients or carriers comprising, for example, cocoa butter, polyethylene glycol, a suppository wax or a salicylate, and which, for example, is solid at room temperature, but liquid at body temperature and, therefore, will melt in the rectum or vaginal cavity and release the siRNA molecule.

[0188] Formulations of the present disclosure which are suitable for vaginal administration also include, for example, pessaries, tampons, creams, gels, pastes, foams or spray formulations containing such carriers as are known in the art to be appropriate.

[0189] Dosage forms for the topical or transdermal administration of a siRNA molecule of this disclosure include, for example, powders, sprays, ointments, pastes, creams, lotions, gels, solutions, patches and inhalants. The siRNA molecule may be mixed under sterile conditions with a pharmaceutically acceptable carrier, and with any preservatives, buffers, or propellants which may be required.

[0190] The ointments, pastes, creams and gels may contain, in addition to an active siRNA molecule of this disclosure, excipients, such as, for example, animal and vegetable fats, oils, waxes, paraffins, starch, tragacanth, cellulose derivatives, polyethylene glycols, silicones, bentonites, silicic acid, talc and zinc oxide, or mixtures thereof.

[0191] Powders and sprays can contain, in addition to a siRNA molecule of this disclosure, excipients such as, for example, lactose, talc, silicic acid, aluminum hydroxide, calcium silicates and polyamide powder, or mixtures of these substances. Sprays can additionally contain customary propellants, such as, for example, chlorofluorohydrocarbons and volatile unsubstituted hydrocarbons, such as butane and propane.

[0192] Transdermal patches have the added advantage of providing controlled delivery of a siRNA molecule) of the present disclosure to the body. Such dosage forms can be made by dissolving or dispersing the siRNA molecule in the proper medium. Absorption enhancers can also be used to increase the flux of the siRNA molecule across the skin. The rate of such flux can be controlled, for example, by either providing a rate controlling membrane or dispersing the siRNA molecule in a polymer matrix or gel.

[0193] Pharmaceutical compositions of this disclosure suitable for parenteral administration comprise one or more siRNA molecules of the disclosure in combination with one or more pharmaceutically-acceptable sterile isotonic aqueous or nonaqueous solutions, dispersions, suspensions or emulsions, or sterile powders which may be reconstituted into sterile injectable solutions or dispersions just prior to use, which may contain, for example, sugars, alcohols, antioxidants, buffers, bacteriostats, solutes which render the formulation isotonic with the blood of the intended recipient or suspending or thickening agents.

[0194] Examples of suitable aqueous and nonaqueous carriers which may be employed in the pharmaceutical compositions of the disclosure include water, ethanol, polyols (such as glycerol, propylene glycol, polyethylene glycol, and the like), and suitable mixtures thereof, vegetable oils, such as olive oil, and injectable organic esters, such as ethyl oleate. Proper fluidity can be maintained, for example, by the use of coating materials, such as lecithin, by the maintenance of the required particle size in the case of dispersions, and by the use of surfactants.

[0195] The pharmaceutical compositions of the disclosure may also contain adjuvants such as preservatives, wetting agents, emulsifying agents and dispersing agents. Prevention of the action of microorganisms upon the subject compounds may be ensured, for example, by the inclusion of various antibacterial and antifungal agents, for example, paraben, chlorobutanol, phenol sorbic acid, and the like. It may also be desirable to include isotonic agents, such as sugars, sodium chloride, and the like into the compositions. In addition, prolonged absorption of the injectable pharmaceutical form may be brought about, for example, by the inclusion of agents which delay absorption such as aluminum monostearate and gelatin.

[0196] In some embodiments, in order to prolong the effect of a drug, it is desirable to slow the absorption of the drug, for example from subcutaneous or intramuscular injection. This may be accomplished, for example, by the use of a liquid suspension of crystalline or amorphous material having poor water solubility. The rate of absorption of the drug then depends upon its rate of dissolution which, in turn, may depend upon crystal size and crystalline form. Alternatively, delayed absorption of a parenterally-administered drug form is accomplished by dissolving or suspending the drug in an oil vehicle.

[0197] In some embodiments, the administration is via a depot injection. Injectable depot forms can be made by forming microencapsule matrices of the subject siRNA molecules in biodegradable polymers such as polylactide-polyglycolide. Depending on the ratio of drug to polymer, and the nature of the particular polymer employed, the rate of drug release can be controlled. Examples of other biodegradable polymers include poly(orthoesters) and poly(anhydrides). Depot injectable formulations can also be prepared, for example, by entrapping the drug in liposomes or microemulsions which are compatible with body tissue.

[0198] Depot injection may release the siRNA in a consistent way over a prolonged time period. Thus, a depot injection may reduce the frequency of dosing needed to obtain a desired effect, e.g., a desired inhibition of HSD17B13, or a therapeutic or prophylactic effect. A depot injection may also provide more consistent serum concentrations. Depot injections may include, for example, subcutaneous injections or intramuscular injections. In some embodiments, the depot injection is a subcutaneous injection.

[0199] In some embodiments, the administration is via a pump. The pump may be an external pump or a surgically implanted pump. In certain embodiments, the pump is a subcutaneously implanted osmotic pump. In other embodiments, the pump is an infusion pump. An infusion pump may be used, for example, for intravenous, subcutaneous, arterial, or epidural infusions. In some embodiments, the infusion pump is a subcutaneous infusion pump. In other embodiments, the pump is a surgically implanted pump that delivers the siRNA to the subject.

[0200] In some embodiments, the pharmaceutical compositions of the disclosure are packaged with or stored within a device for administration. Devices for injectable formulations include, but are not limited to, injection ports, pre-filled syringes, auto injectors, injection pumps, on-body injectors, and injection pens. Devices for aerosolized or powder formulations include, but are not limited to, inhalers, insufflators, aspirators, and the like. Thus, the present disclosure includes administration devices comprising a pharmaceutical composition of the disclosure for treating or preventing one or more of the disorders described herein.

[0201] The mode of administration may be chosen, for example, based upon whether local or systemic treatment is desired and based upon the area to be treated. The route and site of administration may be chosen, for example, to enhance targeting.

[0202] Regardless of the route of administration selected, the siRNA molecules of the present disclosure, which may be used in a suitable hydrated form, and/or the pharmaceutical compositions of the present disclosure, may be formulated into pharmaceutically-acceptable dosage forms by methods known to those of skill in the art. Methods for the formulation of pharmaceutical compositions depend on a number of criteria, including, but not limited to, route of administration, type and extent of disease or disorder to be treated, and/or dose to be administered. In some embodiments, the pharmaceutical compositions are formulated based on the intended route of delivery. The preparation of the pharmaceutical compositions can be carried out in a known manner. For this purpose, one or more compounds, together with one or more solid or liquid pharmaceutical carrier substances and/or additives (or auxiliary substances) and, if desired, in combination with other pharmaceutically active compounds having therapeutic or prophylactic action, are brought into a suitable administration form or dosage.

[0203] The pharmaceutical compositions may conveniently be presented in unit dosage form and may be prepared by any methods known in the art of pharmacy. The amount of active ingredient which can be combined with a carrier material to produce a single dosage form will vary depending upon the host being treated and the particular mode of administration, for example, as described below. The amount of active ingredient which can be combined with a carrier material to produce a single dosage form will generally be, for example, that amount of the siRNA molecule which produces a therapeutic effect. In some embodiments, for example, out of one hundred percent, this amount will range from about 0.1 percent to about ninety-nine percent of active ingredient, or from about 5 percent to about 70 percent, or from about 10 percent to about 30 percent.

[0204] Actual dosage levels of the active ingredients in the pharmaceutical compositions of this disclosure may be varied so as to obtain an amount of the active ingredient which is effective to achieve the desired therapeutic response for a particular patient, composition, and mode of administration, without being toxic to the patient. For example, the siRNA molecules in the pharmaceutical compositions of the disclosure may be administered in dosages sufficient to downregulate the expression of a HSD17B13 gene.

[0205] The siRNA molecules and pharmaceutical compositions of the present disclosure may be used to treat a disease in a subject in need thereof, for example in the methods described below.

### Dosages

[0206] The dosage amount and/or regimen utilizing a siRNA molecule of the disclosure may be selected in accordance with a variety of factors including, for example, the activity of the particular siRNA molecule of the present disclosure employed, or the salt thereof; the severity of the condition to be treated; the route of administration; the time of administration; the rate of excretion or metabolism of the particular siRNA molecule being employed; the rate and extent of absorption; the duration of the treatment; other drugs, compounds and/or materials used in combination with the particular siRNA molecule employed; the type, species, age, sex, weight, condition, general health and prior medical history of the patient being treated; the renal and hepatic function of the patient; and like factors well known in the medical arts. A consideration of these factors is well within the purview of the ordinarily skilled clinician for the purpose of determining a therapeutically effective amount.

[0207] In some embodiments, a suitable daily dose of a siRNA molecule of the disclosure is, for example, the amount of the siRNA molecule that is the lowest dose effective to produce a therapeutic effect. For example, a physician or veterinarian could start doses of the siRNA molecules of the disclosure employed in a pharmaceutical composition at levels lower than that required in order to achieve the desired therapeutic effect and gradually increase the dosage until the desired effect is achieved. Such an effective dose may depend, for example, upon the factors described above. In some embodiments, the siRNA molecules of the disclosure may be administered in dosages sufficient to downregulate or inhibit expression of a HSD17B13 gene.

[0208] In some embodiments, the siRNA molecule is administered at about 0.01 mg/kg to about 200 mg/kg, or at about 0.1 mg/kg to about 100 mg/kg, or at about 0.5 mg/kg to about 50 mg/kg. In some embodiments, the siRNA molecule is administered at about 1 mg/kg to about 40 mg/kg, or at about 1 mg/kg to about 30 mg/kg, or at about 1 mg/kg to about 20 mg/kg, or at about 1 mg/kg to about 15 mg/kg, or at about 1 mg/kg to about 10 mg/kg. In some embodiments, the siRNA molecule is administered at a dose equal to or greater than 0.01, 0.02, 0.03, 0.04, 0.05, 0.06, 0.07, 0.08, 0.09, 0.10, 0.11, 0.12, 0.13, 0.14, 0.15, 0.16, 0.17, 0.18, 0.19, 0.20, 0.21, 0.22, 0.23, 0.24, 0.25, 0.26, 0.27, 0.28, 0.29, 0.30, 0.35, 0.40, 0.45, 0.50, 0.55, 0.60, 0.65, 0.70, 0.75, 0.80, 0.85, 0.90, 0.95, or 1 mg/kg. In some embodiments, the siRNA molecule is administered at a dose equal to or greater than 1, 2, 3, 4, 5, 6, 7, 8, 9, 10, 11, 12, 13, 14, 15, 16, 17, 18, 19, 20, 21, 22, 23, 24, 25, 26, 27, 28, 29, or 30 mg/kg. In some embodiments, the siRNA molecule is administered at a dose equal to or less than 200, 190, 180, 170, 160, 150, 140, 130, 120, 110, 100, 95, 90, 85, 80, 75, 70, 65, 60, 55, 50, 45, 40, 35, 30, 25, 20, or 15 mg/kg. In some embodiments, the total daily dose of the siRNA molecule is equal to or greater than 10, 15, 20, 25, 30, 35, 40, 45, 50, 55, 60, 65, 70, 75, 80, 85, 90, 95, 100, 105, 110, 115, 120, 125, 130, 135, 140, 145, 150, 155, 160, 165, 170, 175, 180, 185, 190, 195, or 100 mg.

[0209] In some embodiments, treatment of a subject with a therapeutically effective amount of a siRNA molecule of the disclosure can include a single treatment or a series of treatments. In some embodiments, the siRNA molecule is administered as a single dose or may be divided into multiple doses. In some embodiments, the effective daily dose of the siRNA molecule may be administered as two, three, four, five, six, seven, eight, nine, ten or more doses or sub-doses administered separately at appropriate intervals throughout the day, optionally, in unit dosage forms.

[0210] In some embodiments, the siRNA molecule is administered once daily. In some embodiments, the siRNA molecule is administered once weekly. In some embodiments, the siRNA molecule is administered at least 1, 2, 3, 4, 5, 6, 7, 8, 9, 10, 11, 12, 13, 14, or 15 times per day. In some embodiments, the siRNA molecule is administered at least 1, 2, 3, 4, 5, 6, 7, 8, 9, 10, 11, 12, 13, 14, 15, 16, 17, 18, 19, 20, or 21 times a week. In some embodiments, the siRNA molecule is administered at least 1, 2, 3, 4, 5, 6, 7, 8, 9, 10, 11, 12, 13, 14, 15, 16, 17, 18, 19, 20, 21, 22, 23, 24, 25, 26, 27, 28, 29, 30, or 31 times a month. In some embodiments, the siRNA molecule is administered once every 1, 2, 3, 4, 5, 6, 7, 8, 9, 10, 11, 12, 13, 14, 15, 16, 17, 18, 19, 20, 21, 22, 23, 24, 25, 26, 27, 28, 29, 30, or 31 days. In some embodiments, the siRNA molecule is administered every 3 days. In some embodiments, the siRNA molecule is administered once every 1, 2, 3, 4, 5, 6, 7, 8, 9, 10, 11, 12, 13, 14, or 15 weeks. In some embodiments, the siRNA molecule is administered once a month. In some embodiments, the siRNA molecule is administered once every 1, 2, 3, 4, 5, 6, 7, 8, 9, 10, 11, 12, 13, 14, or 15 months.

[0211] In some embodiments, the siRNA molecule is administered at least 1, 2, 3, 4, 5, 6, 7, 8, 9, 10, 11, 12, 13, 14, 15, 16, 17, 18, 19, 20, 21, 22, 23, 24, 25, 26, 27, 28, 29, 30, 31, 32, 33, 34, 35, 36, 37, 38, 39, 40, 41, 42, 43, 44, 45, 46, 47, 48, 49, 50, 51, 52, or 53 times over a period of at least 1, 2, 3, 4, 5, 6, 7, 8, 9, 10, 11, 12, 13, 14, 15, 16, 17, 18, 19, 20, 21, 22, 23, 24, 25, 26, 27, 28, 29, 30, 31, 32, 33, 34, 35, 36, 37, 38, 39, 40, 41, 42, 43, 44, 45, 46, 47, 48, 49, 50, 51, 52, 53, 54, 55, 56, 57, 58, 59, 60, 61, 62, 63, 64, 65, 66, 67, 68, 69, or 70 days. In some embodiments, the siRNA molecule is administered at least 1, 2, 3, 4, 5, 6, 7, 8, 9, 10, 11, 12, 13, 14, 15, 16, 17, 18, 19, 20, 21, 22, 23, 24, 25, 26, 27, 28, 29, 30, 31, 32, 33, 34, 35, 36, 37, 38, 39, 40, 41, 42, 43, 44, 45, 46, 47, 48, 49, 50, 51, 52, or 53 times over a period of at least 1, 2, 3, 4, 5, 6, 7, 8, 9, 10, 11, 12, 13, 14, 15, 16, 17, 18, 19, 20, 21, 22, 23, 24, 25, 26, 27, 28, 29, 30, 31, 32, 33, 34, 35, 36, 37, 38, 39, 40, 41, 42, 43, 44, 45, 46, 47, 48, 49, 50, 51, 52, or 53 weeks. In some embodiments, the siRNA molecule is administered at least 1, 2, 3, 4, 5, 6, 7, 8, 9, 10, 11, 12, 13, 14, 15, 16, 17, 18, 19, 20, 21, 22, 23, 24, 25, 26, 27, 28, 29, 30, 31, 32, 33, 34, 35, 36, 37, 38, 39, 40, 41, 42, 43, 44, 45, 46, 47, 48, 49, 50, 51, 52, or 53 times over a period of at least 1, 2, 3, 4, 5, 6, 7, 8, 9, 10, 11, 12, 13, 14, 15, 16, 17, 18, 19, 20, 21, 22, 23, 24, 25, 26, 27, 28, 29, 30, 31, 32, 33, 34, 35, 36, 37, 38, 39, 40, 41, 42, 43, 44, 45, 46, 47, 48, 49, 50, 51, 52, or 53 months. In some embodiments, the siRNA molecule is administered at least once a week for a period of at least 1, 2, 3, 4, 5, 6, 7, 8, 9, 10, 11, 12, 13, 14, 15, 16, 17, 18, 19, 20, 21, 22, 23, 24, 25, 26, 27, 28, 29, 30, 31, 32, 33, 34, 35, 36, 37, 38, 39, 40, 41, 42, 43, 44, 45, 46, 47, 48, 49, 50, 51, 52, 53, 54, 55, 56, 57, 58, 59, 60, 61, 62, 63, 64, 65, 66, 67, 68, 69, or 70 weeks. In some embodiments, the siRNA molecule is administered at least once a week for a period of at least 1, 2, 3, 4, 5, 6, 7, 8, 9, 10, 11, 12, 13, 14, 15, 16, 17, 18, 19, 20, 21, 22, 23, 24, 25, 26, 27, 28, 29, 30, 31, 32, 33, 34, 35, 36, 37, 38, 39, 40, 41, 42, 43, 44, 45, 46, 47, 48, 49, 50, 51, 52, 53, 54, 55, 56, 57, 58, 59, 60, 61, 62, 63, 64, 65, 66, 67, 68, 69, or 70 months. In some embodiments, the siRNA molecule is administered at least twice a week for a period of at least 1, 2, 3, 4, 5, 6, 7, 8, 9, 10, 11, 12, 13, 14, 15, 16, 17, 18, 19, 20, 21, 22, 23, 24, 25, 26, 27, 28, 29, 30, 31, 32, 33, 34, 35, 36, 37, 38, 39, 40, 41, 42, 43, 44, 45, 46, 47, 48, 49, 50, 51, 52, 53, 54, 55, 56, 57, 58, 59, 60, 61, 62, 63, 64, 65, 66, 67, 68, 69, or 70 weeks. In some embodiments, the siRNA molecule is administered at least twice a week for a period of at least 1, 2, 3, 4, 5, 6, 7, 8, 9, 10, 11, 12, 13, 14, 15, 16, 17, 18, 19, 20, 21, 22, 23, 24, 25, 26, 27, 28, 29, 30, 31, 32, 33, 34, 35, 36, 37, 38, 39, 40, 41, 42, 43, 44, 45, 46, 47, 48, 49, 50, 51, 52, 53, 54, 55, 56, 57, 58, 59, 60, 61, 62, 63, 64, 65, 66, 67, 68, 69, or 70 months. In some embodiments, the siRNA molecule is administered at least once every two weeks for a period of at least 2, 3, 4, 5, 6, 7, 8, 9, 10, 11, 12, 13, 14, 15, 16, 17, 18, 19, 20, 21, 22, 23, 24, 25, 26, 27, 28, 29, 30, 31, 32, 33, 34, 35, 36, 37, 38, 39, 40, 41, 42, 43, 44, 45, 46, 47, 48, 49, 50, 51, 52, 53, 54, 55, 56, 57, 58, 59, 60, 61, 62, 63, 64, 65, 66, 67, 68, 69, or 70 weeks. In some embodiments, the siRNA molecule is administered at least once every two weeks for a period of at least 2, 3, 4, 5, 6, 7, 8, 9, 10, 11, 12, 13, 14, 15, 16, 17, 18, 19, 20, 21, 22, 23, 24, 25, 26, 27, 28, 29, 30, 31, 32, 33, 34, 35, 36, 37, 38, 39, 40, 41, 42, 43, 44, 45, 46, 47, 48, 49, 50, 51, 52, 53, 54, 55, 56, 57, 58, 59, 60, 61, 62, 63, 64, 65, 66, 67, 68, 69, or 70 months. In some embodiments, the siRNA molecule is administered at least once every four weeks for a period of at least 4, 5, 6, 7, 8, 9, 10, 11, 12, 13, 14, 15, 16, 17, 18, 19, 20, 21, 22, 23, 24, 25, 26, 27, 28, 29, 30, 31, 32, 33, 34, 35, 36, 37, 38, 39, 40, 41, 42, 43, 44, 45, 46, 47, 48, 49, 50, 51, 52, 53, 54, 55, 56, 57, 58, 59, 60, 61, 62, 63, 64, 65, 66, 67, 68, 69, or 70 weeks. In some embodiments, the siRNA molecule is administered at least once every four weeks for a period of at least 4, 5, 6, 7, 8, 9, 10, 11, 12, 13, 14, 15, 16, 17, 18, 19, 20, 21, 22, 23, 24, 25, 26, 27, 28, 29, 30, 31, 32, 33, 34, 35, 36, 37, 38, 39, 40, 41, 42, 43, 44, 45, 46, 47, 48, 49, 50, 51, 52, 53, 54, 55, 56, 57, 58, 59, 60, 61, 62, 63, 64, 65, 66, 67, 68, 69, or 70 months.

[0212] In some embodiments, a repeat-dose regimen may include administration of a therapeutically effective amount of siRNA on a regular basis, such as every other day, once weekly, once per quarter (i.e., about every 3 months), or once a year. In some embodiments, the dosage amount and/or frequency may be decreased after an initial treatment period. In some embodiments, when the siRNA molecules described herein are co-administered with another active agent, the therapeutically effective amount may be less than when the siRNA molecule is used alone.

### Methods and Uses

[0213] Disclosed herein are also methods of treating a HSD17B13-associated disease in a subject in need thereof, comprising administering to the subject any of the siRNA molecules and/or pharmaceutical compositions comprising a siRNA molecule disclosed herein. In an embodiment, the HSD17B13-associated disease is a liver disease.

[0214] When the siRNA molecules of the present disclosure are administered as pharmaceuticals, to humans and animals, they can be given per se or as a pharmaceutical composition as described above containing, for example, 0.1 to 99% (more preferably, 10 to 30%) of siRNA molecule in combination with a pharmaceutically acceptable carrier.

[0215] In some embodiments, a method of treating a disease in a subject in need thereof comprises administering to the subject an amount of any of the siRNA molecules disclosed herein. In an embodiment, the amount is a therapeutically effective amount. In some embodiments, a method of treating a disease in a subject in need thereof comprises administering to the subject an amount of any of the pharmaceutical compositions disclosed herein. In an embodiment, the amount is a therapeutically effective amount.

[0216] In some embodiments, a method of treating a disease in a subject in need thereof comprises administering to the subject any of the siRNA molecules or pharmaceutical compositions disclosed herein in combination with an additional active agent. In some embodiments, the additional active agent is a liver disease treatment agent. In an embodiment, the amount of the siRNA molecule is a therapeutically effective amount. In an embodiment, the amount of the additional active agent is a therapeutically effective amount.

[0217] In some embodiments, the siRNA molecule and the liver disease treatment agent are administered separately. In some embodiments, the siRNA molecule or pharmaceutical composition and the liver disease treatment agent are administered concurrently. In some embodiments, the siRNA molecule or pharmaceutical composition and the liver disease treatment agent are administered sequentially. In some embodiments, the siRNA molecule or pharmaceutical composition is administered prior to administering the liver disease treatment agent. In some embodiments, the siRNA molecule or pharmaceutical composition is administered after administering the liver disease treatment agent. In some embodiments, the pharmaceutical composition comprises the siRNA and the liver disease treatment agent.

[0218] Also disclosed herein are methods of reducing the expression level of HSD17B13 in a subject in need thereof comprising administering to the subject an amount of a siRNA molecule or pharmaceutical composition according to the disclosure. In an embodiment, the amount of the additional active agent is a therapeutically effective amount. In some embodiments, the method of reducing the expression level of HSD17B13 in a subject in need thereof comprising administering to the subject an amount of a siRNA molecule or pharmaceutical composition according to the disclosure reduces the expression level of HSD17B13 in hepatocytes in the subject following administration of the siRNA molecule or pharmaceutical composition as compared to the HSD17B13 expression level in a patient not receiving the siRNA or pharmaceutical composition.

[0219] Also disclosed herein are methods of preventing at least one symptom of a liver disease in a subject in need thereof comprising administering to the subject an amount of any of the siRNA molecules or pharmaceutical compositions of the disclosure, thereby preventing at least one symptom of a liver disease in the subject. In an embodiment, the amount of the additional active agent is a therapeutically effective amount.

[0220] In another aspect, disclosed herein are uses of any of the siRNA molecules or pharmaceutical compositions of the disclosure in the manufacture of a medicament for treating a liver disease. In some embodiments, the present disclosure provides use of a siRNA molecule of the disclosure or pharmaceutical composition comprising an siRNA of the disclosure that targets a HSD17B13 gene in a cell of a mammal in the manufacture of a medicament for inhibiting expression of the HSD17B13 gene in the mammal.

[0221] The methods and uses disclosed herein include administering to a mammal, e.g., a human, a pharmaceutical composition comprising a siRNA molecule that targets a HSD17B13 gene in a cell of the mammal and maintaining for a time sufficient to obtain degradation of the mRNA transcript of the HSD17B13 gene, thereby inhibiting expression of the HSD17B13 gene in the mammal.

[0222] The patient or subject of the described methods may be a mammal, and it includes humans and non-human mammals. In some embodiments, the subject is a human, such as an adult human, human teenager, human child, human toddler, or human infant.

[0223] The siRNA molecules and/or pharmaceutical compositions of the disclosure can be administered in the disclosed methods and uses by any administration route known in the art, including those described above such as, for example, subcutaneous, intravenous, oral, intraperitoneal, or parenteral routes, including, e.g., intracranial (e.g., intraventricular, intraparenchymal and intrathecal), intramuscular, transdermal, airway (aerosol), nasal, rectal, and topical (including buccal and sublingual) administration.

[0224] The siRNA molecules and/or pharmaceutical compositions of the disclosure can be administered in the disclosed methods and uses in any of the of dosages or dosage regimens described above.

### HSD17B13-Associated Diseases

[0225] Any of the siRNAs and/or pharmaceutical compositions and/or methods and/or uses disclosed herein may be used to treat a disease, disorder, and/or condition. In some embodiments, the disease, disorder, and/or condition is associated with HSD17B13 expression or activity. In some embodiments, the disease, disorder, and/or condition is a liver disease. As used herein, the term “HSD17B13-associated disease” includes a disease, disorder, or condition that would benefit from a downregulation in HSD17B13 gene expression, replication or activity. Non-limiting examples of HSD17B13-associated diseases include, but are not limited to, fatty liver (steatosis), nonalcoholic steatohepatitis (NASH), cirrhosis of the liver, accumulation of fat in the liver, inflammation of the liver, hepatocellular necrosis, liver fibrosis, obesity, hepatocellular carcinoma (HCC), or nonalcoholic fatty liver disease (NAFLD). In an embodiment, the HSD17B13-associated disease is NAFLD. In an embodiments, the HSD17B13-associated disease is NASH. In an embodiment, the HSD17B13-associated disease is fatty liver (steatosis). In an embodiment, the HSD17B13-associated disease is NAFLD. In an embodiment, the HSD17B13-associated disease is HCC.

### Combination Therapies

[0226] Any of the siRNAs or pharmaceutical compositions disclosed herein may be combined with one or more additional active agents in a pharmaceutical composition or in any method according to the disclosure or for use in treating a liver disease. An additional active agent refers to an ingredient with a pharmacologically effect at a relevant dose; an additional active agent may be another siRNA according to the disclosure, a siRNA not in accordance with the disclosure, or a non-siRNA active agent.

[0227] In some embodiments, at least 2, 3, 4, 5, 6, 7, 8, 9, 10 or more siRNAs disclosed herein are combined in a combination therapy.

[0228] In some embodiments, any of the siRNAs or pharmaceutical compositions disclosed herein are combined with a liver disease treatment agent in a combination therapy. In some embodiments, the liver disease treatment agent is selected from a peroxisome proliferator-activator receptor (PPAR) agonist, farnesoid X receptor (FXR) agonist, lipid-altering agent, incretin-based therapy, PNPLA3 inhibitors, and thyroid hormone receptor (THR) modulator.

[0229] In some embodiments, any of the siRNAs or pharmaceutical compositions disclosed herein are combined with a PPAR agonist. In some embodiments, the PPAR agonist is selected from a PPARα agonist, dual PPARα/δ agonist, PPARγ agonist, and dual PPARα/γ agonist. In some embodiments, the dual PPARα agonist is a fibrate. In some embodiments, the PPARα/δ agonist is elafibranor. In some embodiments, the PPARγ agonist is a thiazolidinedione (TZD). In some embodiments, TZD is pioglitazone. In some embodiments, the dual PPARα/γ agonist is saroglitazar.

[0230] In some embodiments, any of the siRNAs or pharmaceutical compositions disclosed herein are combined with a FXR agonist. In some embodiments, the FXR agonist is selected from obeticholic acis (OCA) and TERN-1010.

[0231] In some embodiments, any of the siRNAs or pharmaceutical compositions disclosed herein are combined with a lipid-altering agent. In some embodiments, the lipid-altering agent is aramchol.

[0232] In some embodiments, any of the siRNAs or pharmaceutical compositions disclosed herein are combined with an incretin-based therapy. In some embodiments, the incretin-based therapy is a glucagon-like peptide 1 (GLP-1) receptor agonist or dipeptidyl peptidase 4 (DPP-4) inhibitor. In some embodiments, the GLP-1 receptor agonist is exenatide or liraglutide. In some embodiments, the DPP-4 inhibitor is sitagliptin or vildapliptin.

[0233] In some embodiments, any of the siRNAs or pharmaceutical compositions disclosed herein are combined with a THR modulator. In some embodiments, the THR modulator is selected from a THR-beta modulator and thyroid hormone analogue. Exemplary THR modulators are described in Jakobsson, et al., Drugs, 2017, 77 (15): 1613-1621, Saponaro, et al., Front Med (Lausanne), 2020, 7:331, and Kowalik, et al., Front Endocrinol, 2018, 9:382, which are incorporated by reference in their entireties. In some embodiments, the THR-beta modulator is a THR-beta agonist. In some embodiments, the THR-beta agonist is selected from is selected from KB141, sobetirome, Sob-AM2, eprotirome, VK2809, resmetirom, MB07344, IS25, TG68, GC-24 and any one of the compounds disclosed in U.S. Pat. No. 11,091,467, which is incorporated in its entirety herein. In some embodiments, the thyroid hormone analogue is selected from L-94901 and CG-23425.

[0234] Generally, the liver disease treatment agent may be used in any combination with the siRNA molecules of the disclosure in a single dosage formulation (e.g., a fixed dose drug combination), or in one or more separate dosage formulations which allows for concurrent or sequential administration of the active agents (co-administration of the separate active agents) to subjects. In some embodiments, the siRNA and the liver disease treatment agent are administered concurrently. In some embodiments, the siRNA and the liver disease treatment agent are administered sequentially. In some embodiments, the siRNA is administered prior to administering the liver disease treatment agent. In some embodiments, the siRNA is administered after administering the liver disease treatment agent. The sequence and frequency in which the siRNA and the liver disease treatment agent are administered can vary. In some embodiments, the siRNA and the liver disease treatment agent are in separate containers. In some embodiments, the siRNA and the liver disease treatment agent are in the same container. In some embodiments, the pharmaceutical composition comprises the siRNA and the liver disease treatment agent. The siRNA and the liver disease treatment agent can be administered by the same route of administration or by different routes of administration.

[0235] Still other embodiments of the disclosure have the following features.

[0236] The present technology provides a short interfering nucleic acid (siNA) molecule. The siNA may be single-stranded. Alternatively, the siNA may be double-stranded (ds-siNA) molecules. In any embodiment, the nucleotides may be modified nucleotides, non-modified nucleotides, or any combination thereof. The nucleotides may be ribonucleotides, deoxyribonucleotides, or any combination thereof. The siNA may comprise at least 5 nucleotides. The siNA molecules described herein may comprise modified nucleotides selected from 2′-O-methyl nucleotides and 2′-fluoro nucleotides.

[0237] In any embodiment, the first nucleotide sequence may include a nucleotide sequence of any one of SEQ ID Nos: 1-100, 201-230, 262-287, 314, or 315. In any embodiment, the second nucleotide sequence may include a nucleotide sequence of any one of SEQ ID NOs: 101-200, 231-260, or 288-313.

[0238] In any embodiment, the siNA may reduce or inhibit the production of a hydroxysteroid dehydrogenase. In any embodiment, the siNA may target a hydroxysteroid 17-beta dehydrogenase 13 (HSD17B13) gene.

[0239] In any embodiment, the siNA molecules described herein may comprise 1, 2, 3, 4, 5, 6, 7, 8, 9, or 10 or more phosphorothioate internucleoside linkages. In any embodiment, the siNA molecules described herein may comprise 1, 2, 3, 4, 5, 6, 7, 8, 9, or 10 or more mesyl phosphoroamidate internucleoside linkage(s).

[0240] In any embodiment, the siNA molecules described herein may comprise a phosphorylation blocker. In any embodiment, the siNA molecules described herein may comprise a 5′-stabilized end cap. In any embodiment, the siNA molecules described herein may comprise a galactosamine. In any embodiment, the siNA molecules described herein may comprise a conjugated moeity. In any embodiment, the siNA molecules described herein may comprise a destabilizing nucleotide. In any embodiment, the siNA molecules described herein may comprise a modified nucleotide. In any embodiment, the siNA molecules described herein may comprise a thermally destabilizing nucleotide.

[0241] In any embodiment, the siNA molecules described herein may comprise one or more blunt ends. In any embodiment, the siNA molecules described herein may comprise one or more overhangs.

[0242] In one aspect, the siNA molecule comprises: (a) a sense strand comprising a first nucleotide sequence that is at least about 60%, 65%, 70%, 75%, 80%, 85%, 90%, 95%, or 100% identical to an RNA corresponding to a target gene, wherein the first nucleotide sequence: (i) is 15 to 30 nucleotides in length; and (ii) comprises 15 or more modified nucleotides independently selected from a 2′-O-methyl nucleotide and a 2′-fluoro nucleotide, wherein at least one modified nucleotide is a 2′-O-methyl nucleotide and the nucleotide at position 3, 5, 7, 8, 9, 10, 11, 12, 14, 17, and/or 19 from the 5′ end of the first nucleotide sequence is a 2′-fluoro nucleotide; and (b) an antisense strand comprising a second nucleotide sequence that is at least about 60%, 65%, 70%, 75%, 80%, 85%, 90%, 95%, or 100% complementary to the RNA corresponding to the target gene, wherein the second nucleotide sequence: (i) is 15 to 30 nucleotides in length; and (ii) comprises 15 or more modified nucleotides independently selected from a 2′-O-methyl nucleotide and a 2′-fluoro nucleotide, wherein at least one modified nucleotide is a 2′-O-methyl nucleotide and at least one modified nucleotide is a 2′-fluoro nucleotide.

[0243] In another aspect, the present technology also provides a molecule represented by Formula (VIII):

5′-Aₙ¹Bₙ²Aₙ³Bₙ⁴Aₙ⁵Bₙ⁶Aₙ⁷Bₙ⁸Aₙ⁹-3′
3′-C_{q}¹A_{q}²B_{q}³A_{q}⁴B_{q}⁵A_{q}⁶B_{q}⁷A_{q}⁸B_{q}⁹A_{q}¹⁰B_{q}¹¹A_{q}¹²-5′

[0244] wherein: the top strand is a sense strand comprising a first nucleotide sequence that is at least about 60%, 65%, 70%, 75%, 80%, 85%, 90%, 95%, or 100% identical to an RNA corresponding to a target gene, wherein the first nucleotide sequence comprises 15 to 30 nucleotides; the bottom strand is an antisense strand comprising a second nucleotide sequence that is at least about 60%, 65%, 70%, 75%, 80%, 85%, 90%, 95%, or 100% complementary to the RNA corresponding to the target gene, wherein the second nucleotide sequence comprises 15 to 30 nucleotides; each A is independently a 2′-O-methyl nucleotide or a nucleotide comprising a 5′-stabilized end cap or a phosphorylation blocker; B is a 2′-fluoro nucleotide; C represents overhanging nucleotides and is a 2′-O-methyl nucleotide, deoxy nucleotide, or uracil; n¹=1-6 nucleotides in length; each n², n⁶, n⁸, q³, q⁵, q⁷, q⁹, q¹¹, and q¹² is independently 0-1 nucleotides in length; each n³ and n⁴ is independently 1-3 nucleotides in length; n⁵ is 1-10 nucleotides in length; n⁷ is 0-4 nucleotides in length; each n⁹, q¹, and q² is independently 0-2 nucleotides in length; q⁴ is 0-3 nucleotides in length; q⁶ is 0-5 nucleotides in length; q⁸ is 2-7 nucleotides in length; and q¹⁰ is 2-11 nucleotides in length.

[0245] An exemplary siNA molecule of the present disclosure is shown in FIG. 1. As shown in FIG. 1, an exemplary siNA molecule comprises a sense strand (101) and an antisense strand (102). The sense strand (101) may comprise a first oligonucleotide sequence (103). The first oligonucleotide sequence (103) may comprise one or more phosphorothioate internucleoside linkages (109). The phosphorothioate internucleoside linkage (109) may be between the nucleotides at the 5′ or 3′ terminal end of the first oligonucleotide sequence (103). The phosphorothioate internucleoside linkage (109) may be between the first three nucleotides from the 5′ end of the first oligonucleotide sequence (103). The first oligonucleotide sequence (103) may comprise one or more 2′-fluoro nucleotides (110). The first oligonucleotide sequence (103) may comprise one or more 2′-O methyl nucleotides (111). The first oligonucleotide sequence (103) may comprise 15 or more modified nucleotides independently selected from 2′-fluoro nucleotides (110) and 2′-O methyl nucleotides (111). The sense strand (101) may further comprise a phosphorylation blocker (105). The sense strand (101) may further comprise a galactosamine (106). The antisense strand (102) may comprise a second oligonucleotide sequence (104). The second oligonucleotide sequence (104) may comprise one or more phophorothioate internucleoside linkages (109). The phosphorothioate internucleoside linkage (109) may be between the nucleotides at the 5′ or 3′ terminal end of the second oligonucleotide sequence (104). The phosphorothioate internucleoside linkage (109) may be between the first three nucleotides from the 5′ end of the second oligonucleotide sequence (104). The phosphorothioate internucleoside linkage (109) may be between the first three nucleotides from the 3′ end of the second oligonucleotide sequence (104). The second oligonucleotide sequence (104) may comprise one or more 2′-fluoro nucleotides (110). The second oligonucleotide sequence (104) may comprise one or more 2′-O methyl nucleotides (111). The second oligonucleotide sequence (104) may comprise 15 or more modified nucleotides independently selected from 2′-fluoro nucleotides (110) and 2′-O methyl nucleotides (111). The antisense strand (102) may further comprise a 5′-stabilized end cap (107). The siNA may further comprise one or more blunt ends. Alternatively, or additionally, one end of the siNA may comprise an overhang (108). The overhang (108) may be part of the sense strand (101). The overhang (108) may be part of the antisense strand (102). The overhang (108) may be distinct from the first nucleotide sequence (103). The overhang (108) may be distinct from the second nucleotide sequence (104). The overhang (108) may be part of the first nucleotide sequence (103). The overhang (108) may be part of the second nucleotide sequence (104). The overhang (108) may comprise 1 or more nucleotides. The overhang (108) may comprise 1 or more deoxyribonucleotides. The overhang (108) may comprise 1 or more modified nucleotides. The overhang (108) may comprise 1 or more modified ribonucleotides. The sense strand (101) may be shorter than the antisense strand (102). The sense strand (101) may be the same length as the antisense strand (102). The sense strand (101) may be longer than the antisense strand (102).

[0246] An exemplary siNA molecule of the present disclosure is shown in FIG. 2. As shown in FIG. 2, an exemplary siNA molecule comprises a sense strand (201) and an antisense strand (202). The sense strand (201) may comprise a first oligonucleotide sequence (203). The first oligonucleotide sequence (203) may comprise one or more phophorothioate internucleoside linkages (209). The phosphorothioate internucleoside linkage (209) may be between the nucleotides at the 5′ or 3′ terminal end of the first oligonucleotide sequence (203). The phosphorothioate internucleoside linkage (209) may be between the first three nucleotides from the 5′ end of the first oligonucleotide sequence (203). The first oligonucleotide sequence (203) may comprise one or more 2′-fluoro nucleotides (210). The first oligonucleotide sequence (203) may comprise one or more 2′-O methyl nucleotides (211). The first oligonucleotide sequence (203) may comprise 15 or more modified nucleotides independently selected from 2′-fluoro nucleotides (210) and 2′-O methyl nucleotides (211). The sense strand (201) may further comprise a phosphorylation blocker (205). The sense strand (201) may further comprise a galactosamine (206). The antisense strand (202) may comprise a second oligonucleotide sequence (204). The second oligonucleotide sequence (204) may comprise one or more phophorothioate internucleoside linkages (209). The phosphorothioate internucleoside linkage (209) may be between the nucleotides at the 5′ or 3′ terminal end of the second oligonucleotide sequence (204). The phosphorothioate internucleoside linkage (209) may be between the first three nucleotides from the 5′ end of the second oligonucleotide sequence (204). The phosphorothioate internucleoside linkage (209) may be between the first three nucleotides from the 3′ end of the second oligonucleotide sequence (204). The second oligonucleotide sequence (204) may comprise one or more 2′-fluoro nucleotides (210). The second oligonucleotide sequence (204) may comprise one or more 2′-O methyl nucleotides (211). The second oligonucleotide sequence (204) may comprise 15 or more modified nucleotides independently selected from 2′-fluoro nucleotides (210) and 2′-O methyl nucleotides (211). The antisense strand (202) may further comprise a 5′-stabilized end cap (207). The siNA may further comprise one or more overhangs (208). The overhang (208) may be part of the sense strand (201). The overhang (208) may be part of the antisense strand. (202). The overhang (208) may be distinct from the first nucleotide sequence (203). The overhang (208) may be distinct from the second nucleotide sequence (204). The overhang (208) may be part of the first nucleotide sequence (203). The overhang (208) may be part of the second nucleotide sequence (204). The overhang (208) may be adjacent to the 3′ end of the first nucleotide sequence (203). The overhang (208) may be adjacent to the 5′ end of the first nucleotide sequence (203). The overhang (208) may be adjacent to the 3′ end of the second nucleotide sequence (204). The overhang (208) may be adjacent to the 5′ end of the second nucleotide sequence (204). The overhang (208) may comprise 1 or more nucleotides. The overhang (208) may comprise 1 or more deoxyribonucleotides. The overhang (208) may comprise a TT sequence. The overhang (208) may comprise 1 or more modified nucleotides. The overhang (208) may comprise 1 or more modified nucleotides disclosed herein (e.g., 2-fluoro nucleotide, 2′-O methyl nucleotide, 2′-fluoro nucleotide mimic, 2′-O methyl nucleotide mimic, or a nucleotide comprising a modified nucleobase). The overhang (208) may comprise 1 or more modified ribonucleotides. The sense strand (201) may be shorter than the antisense strand (202). The sense strand (201) may be the same length as the antisense strand (202). The sense strand (201) may be longer than the antisense strand (202).

[0247] FIGS. 3A-3H depict exemplary ds-siNA modification patterns. As shown in FIGS. 3A-3H, an exemplary ds-siNA molecule may have the following formula:

5′-Aₙ¹Bₙ²Aₙ³Bₙ⁴Aₙ⁵Bₙ⁶Aₙ⁷Bₙ⁸Aₙ⁹-3′
3′-C_{q}¹A_{q}²B_{q}³A_{q}⁴B_{q}⁵A_{q}⁶B_{q}⁷A_{q}⁸B_{q}⁹A_{q}¹⁰B_{q}¹¹A_{q}¹²-5′

[0248] wherein: the top strand is a sense strand comprising a first nucleotide sequence that is at least about 60%, 65%, 70%, 75%, 80%, 85%, 90%, 95%, or 100% identical to an RNA corresponding to a target gene, wherein the first nucleotide sequence comprises 15 to 30 nucleotides; the bottom strand is an antisense strand comprising a second nucleotide sequence that is at least about 60%, 65%, 70%, 75%, 80%, 85%, 90%, 95%, or 100% complementary to the RNA corresponding to the target gene, wherein the second nucleotide sequence comprises 15 to 30 nucleotides; each A is independently a 2′-O methyl nucleotide or a nucleotide comprising a 5′ stabilized end cap or phosphorylation blocker; B is a 2′-fluoro nucleotide; C represents overhanging nucleotides and is a 2′-O methyl nucleotide, deoxy nucleotide, or uracil; n¹=1-6 nucleotides in length; each n², n⁶, n⁸, q³, q⁵, q⁷, q⁹, q¹¹, and q¹² is independently 0-1 nucleotides in length; each n³ and n⁴ is independently 1-3 nucleotides in length; n⁵ is 1-10 nucleotides in length; n⁷ is 0-4 nucleotides in length; each n⁹, q¹, and q² is independently 0-2 nucleotides in length; q⁴ is 0-3 nucleotides in length; q⁶ is 0-5 nucleotides in length; q⁸ is 2-7 nucleotides in length; and q¹⁰ is 2-11 nucleotides in length.

[0249] The ds-siNA may further comprise a conjugated moiety. The conjugated moiety may comprise any of the galactosamines disclosed herein. The ds-siNA may further comprise (i) phosphorothioate internucleoside linkages between the nucleotides at positions 1 and 2 and positions 2 and 3 from the 5′ end of the sense strand; and (ii) phosphorothioate internucleoside linkages between the nucleotides at positions 1 and 2; positions 2 and 3; positions 19 and 20; and positions 20 and 21 from the 5′ end of the antisense strand. The ds-siNA may further comprise a 5′-stabilizing end cap. The 5′-stabilizing end cap may be a vinyl phosphonate. The 5′-stabilizing end cap may be attached to the 5′ end of the antisense strand. In some embodiments, the 2′-O methyl nucleotide at position 1 from the 5′ end of the sense strand is further modified to contain a 5′ stabilizing end cap. In some embodiments, the 2′-O methyl nucleotide at position 1 from the 5′ end of the antisense strand is further modified to contain a 5′ stabilizing end cap. In some embodiments, the 2′-O methyl nucleotide at position 1 from the 5′ end of the sense strand is further modified to contain a phosphorylation blocker. In some embodiments, the 2′-O methyl nucleotide at position 1 from the 3′ end of the sense strand is further modified to contain a phosphorylation blocker. In some embodiments, the 2′-O methyl nucleotide at position 1 from the 5′ end of the antisense strand is further modified to contain a phosphorylation blocker. In some embodiments, the 2′-O methyl nucleotide at position 1 from the 3′ end of the antisense strand is further modified to contain a phosphorylation blocker.

[0250] An exemplary ds-siNA molecule may have the following formula:

5′-A₂₋₆B₁A₁₋₃B₂₋₃A₂₋₁₀B₀₋₁A₀₋₄B₀₋₁A₀₋₂-3′
3′-C₂A₀₋₂B₀₋₁A₀₋₃B₀₋₁A₀₋₅B₀₋₁A₂₋₇B₁A₂₋₁₁B₁A₁-5′

[0251] wherein: the top strand is a sense strand comprising a first nucleotide sequence that is at least about 60%, 65%, 70%, 75%, 80%, 85%, 90%, 95%, or 100% identical to an RNA corresponding to a target gene, wherein the first nucleotide sequence comprises 15 to 30 nucleotides; the bottom strand is an antisense strand comprising a second nucleotide sequence that is at least about 60%, 65%, 70%, 75%, 80%, 85%, 90%, 95%, or 100% complementary to the RNA corresponding to the target gene, wherein the second nucleotide sequence comprises 15 to 30 nucleotides; each A is independently a 2′-O methyl nucleotide or a nucleotide comprising a 5′ stabilized end cap or phosphorylation blocker; B is a 2′-fluoro nucleotide; C represents overhanging nucleotides and is a 2′-O methyl nucleotide, deoxy nucleotide, or uracil.

[0252] The ds-siNA may further comprise a conjugated moiety. The conjugated moiety may comprise any of the galactosamines disclosed herein. The ds-siNA may further comprise (i) phosphorothioate internucleoside linkages between the nucleotides at positions 1 and 2 and positions 2 and 3 from the 5′ end of the sense strand; and (ii) phosphorothioate internucleoside linkages between the nucleotides at positions 1 and 2; positions 2 and 3; positions 19 and 20; and positions 20 and 21 from the 5′ end of the antisense strand. The ds-siNA may further comprise a 5′-stabilizing end cap. The 5′-stabilizing end cap may be a vinyl phosphonate. The vinyl phosphonate may be a deuterated vinyl phosphonate. The deuterated vinyl phosphonate may be a mono-deuterated vinyl phosphonate. The deuterated vinyl phosphonate may be a mono-di-deuterated vinyl phosphonate. The 5′-stabilizing end cap may be attached to the 5′ end of the antisense strand. The 5′-stabilizing end cap may be attached to the 3′ end of the antisense strand. The 5′-stabilizing end cap may be attached to the 5′ end of the sense strand. The 5′-stabilizing end cap may be attached to the 3′ end of the sense strand. In some embodiments, the 2′-O methyl nucleotide at position 1 from the 5′ end of the sense strand is further modified to contain a 5′ stabilizing end cap. In some embodiments, the 2′-O methyl nucleotide at position 1 from the 5′ end of the antisense strand is further modified to contain a 5′ stabilizing end cap. In some embodiments, the 2′-O methyl nucleotide at position 1 from the 5′ end of the sense strand is further modified to contain a phosphorylation blocker. In some embodiments, the 2′-O methyl nucleotide at position 1 from the 3′ end of the sense strand is further modified to contain a phosphorylation blocker. In some embodiments, the 2′-O methyl nucleotide at position 1 from the 5′ end of the antisense strand is further modified to contain a phosphorylation blocker. In some embodiments, the 2′-O methyl nucleotide at position 1 from the 3′ end of the antisense strand is further modified to contain a phosphorylation blocker.

[0253] The exemplary ds-siNA shown in FIGS. 3A-3H comprise (i) a sense strand comprising 19-21 nucleotides; and (ii) an antisense strand comprising 21-23 nucleotides. The ds-siNA may further comprise (iii) a conjugated moiety, wherein the conjugated moiety is attached to the 3′ end of the antisense strand. The ds-siNA may comprise a 2 nucleotide overhang consisting of nucleotides at positions 20 and 21 from the 5′ end of the antisense strand. The ds-siNA may comprise a 2 nucleotide overhang consisting of nucleotides at positions 22 and 23 from the 5′ end of the antisense strand. The ds-siNA may further comprise 1, 2, 3, 4, 5, 6 or more phosphorothioate (ps) internucleoside linkages. At least one phosphorothioate internucleoside linkage may be between the nucleotides at positions 1 and 2 or positions 2 and 3 from the 5′ end of the sense strand. At least one phosphorothioate internucleoside linkage may be between the nucleotides at positions 1 and 2 or positions 2 and 3 from the 5′ end of the antisense strand. At least one phosphorothioate internucleoside linkage may be between the nucleotides at positions 19 and 20, positions 20 and 21, positions 21 and 22, or positions 22 and 23 from the 5′ end of the antisense strand. As shown in FIGS. 3A-3H, 4-6 nucleotides in the sense strand may be 2′-fluoro nucleotides. As shown in FIGS. 3A-3H, 2-5 nucleotides in the antisense strand may be 2′-fluoro nucleotides. As shown in FIGS. 3A-3H, 13-15 nucleotides in the sense strand may be 2′-O methyl nucleotides. As shown in FIGS. 3A-3H, 14-19 nucleotides in the antisense strand may be 2′-O methyl nucleotides. As shown in FIGS. 3A-3H, the ds-siNA does not contain a base pair between 2′-fluoro nucleotides on the sense and antisense strands. In some embodiments, the 2′-O methyl nucleotide at position 1 from the 5′ end of the sense strand is further modified to contain a 5′ stabilizing end cap. In some embodiments, the 2′-O methyl nucleotide at position 1 from the 5′ end of the antisense strand is further modified to contain a 5′ stabilizing end cap. In some embodiments, the 2′-O methyl nucleotide at position 1 from the 5′ end of the sense strand is further modified to contain a phosphorylation blocker. In some embodiments, the 2′-O methyl nucleotide at position 1 from the 3′ end of the sense strand is further modified to contain a phosphorylation blocker. In some embodiments, the 2′-O methyl nucleotide at position 1 from the 5′ end of the antisense strand is further modified to contain a phosphorylation blocker. In some embodiments, the 2′-O methyl nucleotide at position 1 from the 3′ end of the antisense strand is further modified to contain a phosphorylation blocker.

[0254] In some embodiments, the (a) a sense strand may comprise a first nucleotide sequence consisting of 17 to 23 nucleotides, wherein 2′-fluoro nucleotides are at positions 3, 7-9, 12, and 17 from the 5′ end of the first nucleotide sequence, and wherein 2′-O methyl nucleotides are at positions 1, 2, 4-6, 10, 11, and 13-16 from the 5′ end of the first nucleotide sequence; and (b) an antisense strand comprising a second nucleotide sequence consisting of 17 to 23 nucleotides. In some embodiments, 2′-fluoro nucleotides are at positions 2 and 14 from the 5′ end of the second nucleotide sequence, and wherein 2′-O methyl nucleotides are at positions 1, 3-13, and 15-17 from the 5′ end of the second nucleotide sequence. In some embodiments, the nucleotides in the second nucleotide sequence are arranged in an alternating 1:3 modification pattern, and wherein 1 nucleotide is a 2′-fluoro nucleotide and 3 nucleotides are 2′-O methyl nucleotides. In some embodiments, the nucleotides in the second nucleotide sequence are arranged in an alternating 1:2 modification pattern, and wherein 1 nucleotide is a 2′-fluoro nucleotide and 2 nucleotides are 2′-O methyl nucleotides. In any embodiment, the first nucleotide sequence consists of 19 nucleotides. In any embodiment, 2′-O methyl nucleotides are at positions 18 and 19 from the 5′ end of the first nucleotide sequence. In any embodiment, the second nucleotide sequence consists of 21 nucleotides. In any embodiment, 2′-O methyl nucleotides are at positions 18-21 or 19-21 from the 5′ end of the second nucleotide sequence. As shown in FIG. 3A, a ds-siNA may comprise (a) a sense strand consisting of 19 nucleotides, wherein 2′-fluoro nucleotides are at positions 3, 7-9, 12, and 17 from the 5′ end of the sense strand, and wherein 2′-O methyl nucleotides are at positions 1, 2, 4-6, 10, 11, 13-16, 18, and 19 from the 5′ end of the sense strand; (b) an antisense strand consisting of 21 nucleotides, wherein nucleotides at positions 2 and 14 from the 5′ end of the antisense strand are 2′-fluoro nucleotides; and wherein nucleotides at positions 1, 3-13, and 15-21 are 2′-O methyl nucleotides. The ds-siNA may further comprise a conjugated moiety attached to the 3′ end of the sense strand. The ds-siNA may further comprise (i) phosphorothioate internucleoside linkages between the nucleotides at positions 1 and 2 and positions 2 and 3 from the 5′ end of the sense strand; and (ii) phosphorothioate internucleoside linkages between the nucleotides at positions 1 and 2; positions 2 and 3; positions 19 and 20; and positions 20 and 21 from the 5′ end of the antisense strand. In some embodiments, the 2′-O methyl nucleotide at position 1 from the 5′ end of the sense strand is further modified to contain a 5′ stabilizing end cap. In some embodiments, the 2′-O methyl nucleotide at position 1 from the 5′ end of the antisense strand is further modified to contain a 5′ stabilizing end cap. In some embodiments, the 2′-O methyl nucleotide at position 1 from the 5′ end of the sense strand is further modified to contain a phosphorylation blocker. In some embodiments, the 2′-O methyl nucleotide at position 1 from the 3′ end of the sense strand is further modified to contain a phosphorylation blocker. In some embodiments, the 2′-O methyl nucleotide at position 1 from the 5′ end of the antisense strand is further modified to contain a phosphorylation blocker. In some embodiments, the 2′-O methyl nucleotide at position 1 from the 3′ end of the antisense strand is further modified to contain a phosphorylation blocker. In some embodiments, the 2′-O methyl nucleotide at position 1 from the 5′ end of the sense strand is a d2vd3 nucleotide, a d2vd3U nucleotide, an omeco-d3 nucleotide, an omeco-d3U nucleotide, a 4 h nucleotide, a 4hU nucleotide, a v-mun nucleotide, a c20-4 h nucleotide, an omeco-munb nucleotide, a d2vm nucleotide, or a d2vmA nucleotide. In some embodiments, the 2′-O methyl nucleotide at position 1 from the 5′ end of the antisense strand is a d2vd3 nucleotide, a d2vd3U nucleotide, an omeco-d3 nucleotide, an omeco-d3U nucleotide, a 4 h nucleotide, a 4hU nucleotide, a v-mun nucleotide, a c20-4 h nucleotide, an omeco-munb nucleotide, a d2vm nucleotide, or a d2vmA nucleotide. In some embodiments, the 2′-O methyl nucleotide at position 1 from the 3′ end of the sense strand is a d2vd3 nucleotide, a d2vd3U nucleotide, an omeco-d3 nucleotide, an omeco-d3U nucleotide, a 4 h nucleotide, a 4hU nucleotide, a v-mun nucleotide, a c20-4 h nucleotide, an omeco-munb nucleotide, a d2vm nucleotide, or a d2vmA nucleotide. In some embodiments, the 2′-O methyl nucleotide at position 1 from the 3′ end of the antisense strand is a d2vd3 nucleotide, a d2vd3U nucleotide, an omeco-d3 nucleotide, an omeco-d3U nucleotide, a 4 h nucleotide, a 4hU nucleotide, a v-mun nucleotide, a c20-4 h nucleotide, an omeco-munb nucleotide, a d2vm nucleotide, or a d2vmA nucleotide. In some embodiments, at least 1, 2, 3, 4 or more 2′-fluoro nucleotides on the sense strand or antisense strand is a 2′-fluoro nucleotide mimic. In some embodiments, at least 1, 2, 3, 4 or more 2′-fluoro nucleotides on the sense strand or antisense strand is a fB, fN, f(4nh)Q, f4P, f2P, or fX nucleotide. In some embodiments, at least 1, 2, 3, 4 or more 2′-O methyl nucleotide on the sense or antisense strand is a 2′-O methyl nucleotide mimic. In some embodiments, one or more nucleotides in the sense strand and/or the antisense strand may be a 3′,4′ seco modified nucleotide in which the bond between the 3′ and 4′ positions of the furanose ring is broken (e.g., mun34).

[0255] In some embodiments, the (a) a sense strand comprising a first nucleotide sequence consisting of 17 to 23 nucleotides, wherein 2′-fluoro nucleotides are at positions 3, 7, 8, and 17 from the 5′ end of the first nucleotide sequence, and wherein 2′-O methyl nucleotides are at positions 1, 2, 4-6, and 9-16 from the 5′ end of the first nucleotide sequence; and (b) an antisense strand comprising a second nucleotide sequence consisting of 17 to 23 nucleotides. In some embodiments, 2′-fluoro nucleotides are at positions 2 and 14 from the 5′ end of the second nucleotide sequence, and wherein 2′-O methyl nucleotides are at positions 1, 3-13, and 15-17 from the 5′ end of the second nucleotide sequence. In some embodiments, the nucleotides in the second nucleotide sequence are arranged in an alternating 1:3 modification pattern, and wherein 1 nucleotide is a 2′-fluoro nucleotide and 3 nucleotides are 2′-O methyl nucleotides. In some embodiments, the nucleotides in the second nucleotide sequence are arranged in an alternating 1:2 modification pattern, and wherein 1 nucleotide is a 2′-fluoro nucleotide and 2 nucleotides are 2′-O methyl nucleotides. In any embodiment, the first nucleotide sequence consists of 19 nucleotides. In any embodiment, 2′-O methyl nucleotides are at positions 18 and 19 from the 5′ end of the first nucleotide sequence. In any embodiment, the second nucleotide sequence consists of 21 nucleotides. In any embodiment, 2′-O methyl nucleotides are at positions 18-21 or 19-21 from the 5′ end of the second nucleotide sequence. As shown in FIG. 3B, a ds-siNA may comprise (a) a sense strand consisting of 19 nucleotides, wherein 2′-fluoro nucleotides are at positions 3, 7, 8, and 17 from the 5′ end of the sense strand, and wherein 2′-O methyl nucleotides are at positions 1, 2, 4-6, 9-16, 18, and 19 from the 5′ end of the sense strand; (b) an antisense strand consisting of 21 nucleotides, wherein nucleotides at positions 2 and 14 from the 5′ end of the antisense strand are 2′-fluoro nucleotides; and wherein nucleotides at positions 1, 3-13, and 15-21 are 2′-O methyl nucleotides. The ds-siNA may further comprise a conjugated moiety attached to the 3′ end of the sense strand. The ds-siNA may further comprise (i) phosphorothioate internucleoside linkages between the nucleotides at positions 1 and 2 and positions 2 and 3 from the 5′ end of the sense strand; and (ii) phosphorothioate internucleoside linkages between the nucleotides at positions 1 and 2; positions 2 and 3; positions 19 and 20; and positions 20 and 21 from the 5′ end of the antisense strand. In some embodiments, the 2′-O methyl nucleotide at position 1 from the 5′ end of the sense strand is further modified to contain a 5′ stabilizing end cap. In some embodiments, the 2′-O methyl nucleotide at position 1 from the 5′ end of the antisense strand is further modified to contain a 5′ stabilizing end cap. In some embodiments, the 2′-O methyl nucleotide at position 1 from the 5′ end of the sense strand is further modified to contain a phosphorylation blocker. In some embodiments, the 2′-O methyl nucleotide at position 1 from the 3′ end of the sense strand is further modified to contain a phosphorylation blocker. In some embodiments, the 2′-O methyl nucleotide at position 1 from the 5′ end of the antisense strand is further modified to contain a phosphorylation blocker. In some embodiments, the 2′-O methyl nucleotide at position 1 from the 3′ end of the antisense strand is further modified to contain a phosphorylation blocker. In some embodiments, the 2′-O methyl nucleotide at position 1 from the 5′ end of the sense strand is a d2vd3 nucleotide, a d2vd3U nucleotide, an omeco-d3 nucleotide, an omeco-d3U nucleotide, a 4 h nucleotide, a 4hU nucleotide, a v-mun nucleotide, a c20-4 h nucleotide, an omeco-munb nucleotide, a d2vm nucleotide, or a d2vmA nucleotide. In some embodiments, the 2′-O methyl nucleotide at position 1 from the 5′ end of the antisense strand is a d2vd3 nucleotide, a d2vd3U nucleotide, an omeco-d3 nucleotide, an omeco-d3U nucleotide, a 4 h nucleotide, a 4hU nucleotide, a v-mun nucleotide, a c20-4 h nucleotide, an omeco-munb nucleotide, a d2vm nucleotide, or a d2vmA nucleotide. In some embodiments, the 2′-O methyl nucleotide at position 1 from the 3′ end of the sense strand is a d2vd3 nucleotide, a d2vd3U nucleotide, an omeco-d3 nucleotide, an omeco-d3U nucleotide, a 4 h nucleotide, a 4hU nucleotide, a v-mun nucleotide, a c20-4 h nucleotide, an omeco-munb nucleotide, a d2vm nucleotide, or a d2vmA nucleotide. In some embodiments, the 2′-O methyl nucleotide at position 1 from the 3′ end of the antisense strand is a d2vd3 nucleotide, a d2vd3U nucleotide, an omeco-d3 nucleotide, an omeco-d3U nucleotide, a 4 h nucleotide, a 4hU nucleotide, a v-mun nucleotide, a c20-4 h nucleotide, an omeco-munb nucleotide, a d2vm nucleotide, or a d2vmA nucleotide. In some embodiments, at least 1, 2, 3, 4 or more 2′-fluoro nucleotides on the sense strand or antisense strand is a 2′-fluoro nucleotide mimic. In some embodiments, at least 1, 2, 3, 4 or more 2′-fluoro nucleotides on the sense strand or antisense strand is a fB, fN, f(4nh)Q, f4P, f2P, or fX nucleotide. In some embodiments, at least 1, 2, 3, 4 or more 2′-O methyl nucleotide on the sense or antisense strand is a 2′-O methyl nucleotide mimic. In some embodiments, one or more nucleotides in the sense strand and/or the antisense strand may be a 3′,4′ seco modified nucleotide in which the bond between the 3′ and 4′ positions of the furanose ring is broken (e.g., mun34).

[0256] In some embodiments, the (a) a sense strand comprising a first nucleotide sequence consisting of 17 to 23 nucleotides, wherein 2′-fluoro nucleotides are at positions 3, 7-9, and 17 from the 5′ end of the first nucleotide sequence, and wherein 2′-O methyl nucleotides are at positions 1, 2, 4-6, and 10-16 from the 5′ end of the first nucleotide sequence; and (b) an antisense strand comprising a second nucleotide sequence consisting of 17 to 23 nucleotides. In some embodiments, 2′-fluoro nucleotides are at positions 2, 6, 10, and 14 from the 5′ end of the second nucleotide sequence, and wherein 2′-O methyl nucleotides are at positions 1, 3-5, 7-9, 11-13, and 15-17 from the 5′ end of the second nucleotide sequence. In some embodiments, the nucleotides in the second nucleotide sequence are arranged in an alternating 1:3 modification pattern, and wherein 1 nucleotide is a 2′-fluoro nucleotide and 3 nucleotides are 2′-O methyl nucleotides. In some embodiments, the nucleotides in the second nucleotide sequence are arranged in an alternating 1:2 modification pattern, and wherein 1 nucleotide is a 2′-fluoro nucleotide and 2 nucleotides are 2′-O methyl nucleotides. In any embodiment, the first nucleotide sequence consists of 19 nucleotides. In any embodiment, 2′-O methyl nucleotides are at positions 18 and 19 from the 5′ end of the first nucleotide sequence. In any embodiment, the second nucleotide sequence consists of 21 nucleotides. In any embodiment, 2′-O methyl nucleotides are at positions 19-21 from the 5′ end of the second nucleotide sequence. As shown in FIG. 3C, a ds-siNA may comprise (a) a sense strand consisting of 19 nucleotides, wherein 2′-fluoro nucleotides are at positions 3, 7-9, 12 and 17 from the 5′ end of the sense strand, and wherein 2′-O methyl nucleotides are at positions 1, 2, 4-6, 10, 11, 13-16, 18, and 19 from the 5′ end of the sense strand; (b) an antisense strand consisting of 21 nucleotides, wherein the nucleotides in the antisense strand comprise an alternating 1:3 modification pattern, and wherein 1 nucleotide is a 2′-fluoro nucleotide and 3 nucleotides are 2′-O methyl nucleotides. The ds-siNA may further comprise a conjugated moiety attached to the 3′ end of the sense strand. The ds-siNA may further comprise (i) phosphorothioate internucleoside linkages between the nucleotides at positions 1 and 2 and positions 2 and 3 from the 5′ end of the sense strand; and (ii) phosphorothioate internucleoside linkages between the nucleotides at positions 1 and 2; positions 2 and 3; positions 19 and 20; and positions 20 and 21 from the 5′ end of the antisense strand. The ds-siNA may comprise 2-5 alternating 1:3 modification patterns on the antisense strand. In some embodiments, the 2′-O methyl nucleotide at position 1 from the 5′ end of the sense strand is further modified to contain a 5′ stabilizing end cap. In some embodiments, the 2′-O methyl nucleotide at position 1 from the 5′ end of the antisense strand is further modified to contain a 5′ stabilizing end cap. In some embodiments, the 2′-O methyl nucleotide at position 1 from the 5′ end of the sense strand is further modified to contain a phosphorylation blocker. In some embodiments, the 2′-O methyl nucleotide at position 1 from the 3′ end of the sense strand is further modified to contain a phosphorylation blocker. In some embodiments, the 2′-O methyl nucleotide at position 1 from the 5′ end of the antisense strand is further modified to contain a phosphorylation blocker. In some embodiments, the 2′-O methyl nucleotide at position 1 from the 3′ end of the antisense strand is further modified to contain a phosphorylation blocker. In some embodiments, the 2′-O methyl nucleotide at position 1 from the 5′ end of the sense strand is a d2vd3 nucleotide, a d2vd3U nucleotide, an omeco-d3 nucleotide, an omeco-d3U nucleotide, a 4 h nucleotide, a 4hU nucleotide, a v-mun nucleotide, a c20-4 h nucleotide, an omeco-munb nucleotide, a d2vm nucleotide, or a d2vmA nucleotide. In some embodiments, the 2′-O methyl nucleotide at position 1 from the 5′ end of the antisense strand is a d2vd3 nucleotide, a d2vd3U nucleotide, an omeco-d3 nucleotide, an omeco-d3U nucleotide, a 4 h nucleotide, a 4hU nucleotide, a v-mun nucleotide, a c20-4 h nucleotide, an omeco-munb nucleotide, a d2vm nucleotide, or a d2vmA nucleotide. In some embodiments, the 2′-O methyl nucleotide at position 1 from the 3′ end of the sense strand is a d2vd3 nucleotide, a d2vd3U nucleotide, an omeco-d3 nucleotide, an omeco-d3U nucleotide, a 4 h nucleotide, a 4hU nucleotide, a v-mun nucleotide, a c20-4 h nucleotide, an omeco-munb nucleotide, a d2vm nucleotide, or a d2vmA nucleotide. In some embodiments, the 2′-O methyl nucleotide at position 1 from the 3′ end of the antisense strand is a d2vd3 nucleotide, a d2vd3U nucleotide, an omeco-d3 nucleotide, an omeco-d3U nucleotide, a 4 h nucleotide, a 4hU nucleotide, a v-mun nucleotide, a c20-4 h nucleotide, an omeco-munb nucleotide, a d2vm nucleotide, or a d2vmA nucleotide. In some embodiments, at least 1, 2, 3, 4 or more 2′-fluoro nucleotides on the sense strand or antisense strand is a 2′-fluoro nucleotide mimic. In some embodiments, at least 1, 2, 3, 4 or more 2′-fluoro nucleotides on the sense strand is a fB, fN, f(4nh)Q, f4P, f2P, or fX nucleotide. In some embodiments, at least 1, 2, 3, 4 or more 2′-fluoro nucleotides on the antisense strand is a fB, fN, f(4nh)Q, f4P, f2P, or fX nucleotide. In some embodiments, at least 1, 2, 3, 4 or more 2′-O methyl nucleotide on the sense or antisense strand is a 2′-O methyl nucleotide mimic. In some embodiments, one or more nucleotides in the sense strand and/or the antisense strand may be a 3′,4′ seco modified nucleotide in which the bond between the 3′ and 4′ positions of the furanose ring is broken (e.g., mun34).

[0257] In some embodiments, the (a) a sense strand comprising a first nucleotide sequence consisting of 17 to 23 nucleotides, wherein 2′-fluoro nucleotides are at positions 5 and 7-9 from the 5′ end of the first nucleotide sequence, and wherein 2′-O methyl nucleotides are at positions 1-4, 6, and 10-17 from the 5′ end of the first nucleotide sequence; and (b) an antisense strand comprising a second nucleotide sequence consisting of 17 to 23 nucleotides. In some embodiments, 2′-fluoro nucleotides are at positions 2, 6, 10, and 14 from the 5′ end of the second nucleotide sequence, and wherein 2′-O methyl nucleotides are at positions 1, 3-5, 7-9, 11-13 and 15-17 from the 5′ end of the second nucleotide sequence. In some embodiments, the nucleotides in the second nucleotide sequence are arranged in an alternating 1:3 modification pattern, and wherein 1 nucleotide is a 2′-fluoro nucleotide and 3 nucleotides are 2′-O methyl nucleotides. In some embodiments, the nucleotides in the second nucleotide sequence are arranged in an alternating 1:2 modification pattern, and wherein 1 nucleotide is a 2′-fluoro nucleotide and 2 nucleotides are 2′-O methyl nucleotides. In any embodiment, the first nucleotide sequence consists of 19 nucleotides. In any embodiment, 2′-O methyl nucleotides are at positions 18 and 19 from the 5′ end of the first nucleotide sequence. In any embodiment, the second nucleotide sequence consists of 21 nucleotides. In any embodiment, 2′-fluoro nucleotide is at position 18 from the 5′ end of the second nucleotide sequence. In any embodiment, 2′-O methyl nucleotides are at positions 19-21 from the 5′ end of the second nucleotide sequence. As shown in FIG. 3D, a ds-siNA may comprise (a) a sense strand consisting of 19 nucleotides, wherein 2′-fluoro nucleotides are at positions 5 and 7-9 from the 5′ end of the sense strand, and wherein 2′-O methyl nucleotides are at positions 1-4, 6, and 10-19 from the 5′ end of the sense strand; (b) an antisense strand consisting of 21 nucleotides, wherein the nucleotides in the antisense strand comprise an alternating 1:3 modification pattern, and wherein 1 nucleotide is a 2′-fluoro nucleotide and 3 nucleotides are 2′-O methyl nucleotides. The ds-siNA may further comprise a conjugated moiety attached to the 3′ end of the sense strand. The ds-siNA may further comprise (i) phosphorothioate internucleoside linkages between the nucleotides at positions 1 and 2 and positions 2 and 3 from the 5′ end of the sense strand; and (ii) phosphorothioate internucleoside linkages between the nucleotides at positions 1 and 2; positions 2 and 3; positions 19 and 20; and positions 20 and 21 from the 5′ end of the antisense strand. The ds-siNA may comprise 2-5 alternating 1:3 modification patterns on the antisense strand. The alternating 1:3 modification pattern may start at the nucleotide at any of positions 2, 6, 10, 14, and/or 18 from the 5′ end of the antisense strand. In some embodiments, the 2′-O methyl nucleotide at position 1 from the 5′ end of the sense strand is further modified to contain a 5′ stabilizing end cap. In some embodiments, the 2′-O methyl nucleotide at position 1 from the 5′ end of the antisense strand is further modified to contain a 5′ stabilizing end cap. In some embodiments, the 2′-O methyl nucleotide at position 1 from the 5′ end of the sense strand is further modified to contain a phosphorylation blocker. In some embodiments, the 2′-O methyl nucleotide at position 1 from the 3′ end of the sense strand is further modified to contain a phosphorylation blocker. In some embodiments, the 2′-O methyl nucleotide at position 1 from the 5′ end of the antisense strand is further modified to contain a phosphorylation blocker. In some embodiments, the 2′-O methyl nucleotide at position 1 from the 3′ end of the antisense strand is further modified to contain a phosphorylation blocker. In some embodiments, the 2′-O methyl nucleotide at position 1 from the 5′ end of the sense strand is a d2vd3 nucleotide, a d2vd3U nucleotide, an omeco-d3 nucleotide, an omeco-d3U nucleotide, a 4 h nucleotide, a 4hU nucleotide, a v-mun nucleotide, a c20-4 h nucleotide, an omeco-munb nucleotide, a d2vm nucleotide, or a d2vmA nucleotide. In some embodiments, the 2′-O methyl nucleotide at position 1 from the 5′ end of the antisense strand is a d2vd3 nucleotide, a d2vd3U nucleotide, an omeco-d3 nucleotide, an omeco-d3U nucleotide, a 4 h nucleotide, a 4hU nucleotide, a v-mun nucleotide, a c20-4 h nucleotide, an omeco-munb nucleotide, a d2vm nucleotide, or a d2vmA nucleotide. In some embodiments, the 2′-O methyl nucleotide at position 1 from the 3′ end of the sense strand is a d2vd3 nucleotide, a d2vd3U nucleotide, an omeco-d3 nucleotide, an omeco-d3U nucleotide, a 4 h nucleotide, a 4hU nucleotide, a v-mun nucleotide, a c20-4 h nucleotide, an omeco-munb nucleotide, a d2vm nucleotide, or a d2vmA nucleotide. In some embodiments, the 2′-O methyl nucleotide at position 1 from the 3′ end of the antisense strand is a d2vd3 nucleotide, a d2vd3U nucleotide, an omeco-d3 nucleotide, an omeco-d3U nucleotide, a 4 h nucleotide, a 4hU nucleotide, a v-mun nucleotide, a c20-4 h nucleotide, an omeco-munb nucleotide, a d2vm nucleotide, or a d2vmA nucleotide. In some embodiments, at least 1, 2, 3, 4 or more 2′-fluoro nucleotides on the sense strand or antisense strand is a 2′-fluoro nucleotide mimic. In some embodiments, at least 1, 2, 3, 4 or more 2′-fluoro nucleotides on the sense strand is a fB, fN, f(4nh)Q, f4P, or f2P nucleotide. In some embodiments, at least 1, 2, 3, 4 or more 2′-fluoro nucleotides on the antisense strand is a fB, fN, f(4nh)Q, f4P, or f2P nucleotide. In some embodiments, at least 1, 2, 3, 4 or more 2′-O methyl nucleotide on the sense or antisense strand is a 2′-O methyl nucleotide mimic. In some embodiments, one or more nucleotides in the sense strand and/or the antisense strand may be a 3′,4′ seco modified nucleotide in which the bond between the 3′ and 4′ positions of the furanose ring is broken (e.g., mun34).

[0258] In some embodiments, the (a) a sense strand comprising a first nucleotide sequence consisting of 17 to 23 nucleotides, wherein 2′-fluoro nucleotides are at positions 5 and 7-9 from the 5′ end of the first nucleotide sequence, and wherein 2′-O methyl nucleotides are at positions 1-4, 6, and 10-17 from the 5′ end of the first nucleotide sequence; and (b) an antisense strand comprising a second nucleotide sequence consisting of 17 to 23 nucleotides. In some embodiments, 2′-fluoro nucleotides are at positions 2, 5, 8, 14, and 17 from the 5′ end of the first nucleotide sequence, and wherein 2′-O methyl nucleotides are at positions 1, 3, 4, 6, 7, 9-13, 15, and 16 from the 5′ end of the first nucleotide sequence. In some embodiments, the nucleotides in the second nucleotide sequence are arranged in an alternating 1:3 modification pattern, and wherein 1 nucleotide is a 2′-fluoro nucleotide and 3 nucleotides are 2′-O methyl nucleotides. In some embodiments, the nucleotides in the second nucleotide sequence are arranged in an alternating 1:2 modification pattern, and wherein 1 nucleotide is a 2′-fluoro nucleotide and 2 nucleotides are 2′-O methyl nucleotides. In any embodiment, the first nucleotide sequence consists of 19 nucleotides. In any embodiment, 2′-O methyl nucleotides are at positions 18 and 19 from the 5′ end of the first nucleotide sequence. In any embodiment, the second nucleotide sequence consists of 21 nucleotides. In any embodiment, 2′-O methyl nucleotides are at positions 18-21 or 19-21 from the 5′ end of the second nucleotide sequence. As shown in FIG. 3E, a ds-siNA may comprise (a) a sense strand consisting of 19 nucleotides, wherein 2′-fluoro nucleotides are at positions 5 and 7-9 from the 5′ end of the sense strand, and wherein 2′-O methyl nucleotides are at positions 1-4, 6, and 10-19 from the 5′ end of the sense strand; (b) an antisense strand consisting of 21 nucleotides, wherein the nucleotides in the antisense strand comprise an alternating 1:2 modification pattern, and wherein 1 nucleotide is a 2′-fluoro nucleotide and 2 nucleotides are 2′-O methyl nucleotides. The ds-siNA may further comprise a conjugated moiety attached to the 3′ end of the sense strand. The ds-siNA may further comprise (i) phosphorothioate internucleoside linkages between the nucleotides at positions 1 and 2 and positions 2 and 3 from the 5′ end of the sense strand; and (ii) phosphorothioate internucleoside linkages between the nucleotides at positions 1 and 2; positions 2 and 3; positions 19 and 20; and positions 20 and 21 from the 5′ end of the antisense strand. The ds-siNA may comprise 2-5 alternating 1:2 modification patterns on the antisense strand. The alternating 1:2 modification pattern may start at the nucleotide at any of positions 2, 5, 8, 14, and/or 17 from the 5′ end of the antisense strand. In some embodiments, the ds-siNA comprises (a) a sense strand consisting of 19 nucleotides, wherein 2′-fluoro nucleotides are at positions 5 and 7-9 from the 5′ end of the sense strand, and wherein 2′-O methyl nucleotides are at positions 1-4, 6, and 10-19 from the 5′ end of the sense strand; (b) an antisense strand consisting of 21 nucleotides, wherein 2′-fluoro nucleotides are at positions 2, 5, 8, 14, and 17 from the 5′ end of the antisense strand, and wherein 2′-O methyl nucleotides are at positions 1, 3, 4, 6, 7, 9-13, 15, 16, and 18-21 from the 5′ end of the sense strand. In some embodiments, the 2′-O methyl nucleotide at position 1 from the 5′ end of the sense strand is further modified to contain a 5′ stabilizing end cap. In some embodiments, the 2′-O methyl nucleotide at position 1 from the 5′ end of the antisense strand is further modified to contain a 5′ stabilizing end cap. In some embodiments, the 2′-O methyl nucleotide at position 1 from the 5′ end of the sense strand is further modified to contain a phosphorylation blocker. In some embodiments, the 2′-O methyl nucleotide at position 1 from the 3′ end of the sense strand is further modified to contain a phosphorylation blocker. In some embodiments, the 2′-O methyl nucleotide at position 1 from the 5′ end of the antisense strand is further modified to contain a phosphorylation blocker. In some embodiments, the 2′-O methyl nucleotide at position 1 from the 3′ end of the antisense strand is further modified to contain a phosphorylation blocker. In some embodiments, the 2′-O methyl nucleotide at position 1 from the 5′ end of the sense strand is a d2vd3 nucleotide, a d2vd3U nucleotide, an omeco-d3 nucleotide, an omeco-d3U nucleotide, a 4 h nucleotide, a 4hU nucleotide, a v-mun nucleotide, a c20-4 h nucleotide, an omeco-munb nucleotide, a d2vm nucleotide, or a d2vmA nucleotide. In some embodiments, the 2′-O methyl nucleotide at position 1 from the 5′ end of the antisense strand is a d2vd3 nucleotide, a d2vd3U nucleotide, an omeco-d3 nucleotide, an omeco-d3U nucleotide, a 4 h nucleotide, a 4hU nucleotide, a v-mun nucleotide, a c20-4 h nucleotide, an omeco-munb nucleotide, a d2vm nucleotide, or a d2vmA nucleotide. In some embodiments, the 2′-O methyl nucleotide at position 1 from the 3′ end of the sense strand is a d2vd3 nucleotide, a d2vd3U nucleotide, an omeco-d3 nucleotide, an omeco-d3U nucleotide, a 4 h nucleotide, a 4hU nucleotide, a v-mun nucleotide, a c20-4 h nucleotide, an omeco-munb nucleotide, a d2vm nucleotide, or a d2vmA nucleotide. In some embodiments, the 2′-O methyl nucleotide at position 1 from the 3′ end of the antisense strand is a d2vd3 nucleotide, a d2vd3U nucleotide, an omeco-d3 nucleotide, an omeco-d3U nucleotide, a 4 h nucleotide, a 4hU nucleotide, a v-mun nucleotide, a c20-4 h nucleotide, an omeco-munb nucleotide, a d2vm nucleotide, or a d2vmA nucleotide. In some embodiments, at least 1, 2, 3, 4 or more 2′-fluoro nucleotides on the sense strand or antisense strand is a 2′-fluoro nucleotide mimic. In some embodiments, at least 1, 2, 3, 4 or more 2′-fluoro nucleotides on the sense strand is a fB, fN, f(4nh)Q, f4P, or f2P nucleotide. In some embodiments, at least 1, 2, 3, 4 or more 2′-fluoro nucleotides on the antisense strand is a fB, fN, f(4nh)Q, f4P, or f2P nucleotide. In some embodiments, at least 1, 2, 3, 4 or more 2′-O methyl nucleotide on the sense or antisense strand is a 2′-O methyl nucleotide mimic. In some embodiments, one or more nucleotides in the sense strand and/or the antisense strand may be a 3′,4′ seco modified nucleotide in which the bond between the 3′ and 4′ positions of the furanose ring is broken (e.g., mun34).

[0259] In some embodiments, the (a) a sense strand comprising a first nucleotide sequence consisting of 17 to 23 nucleotides, wherein 2′-fluoro nucleotides are at positions 5 and 7-9 from the 5′ end of the first nucleotide sequence, and wherein 2′-O methyl nucleotides are at positions 1-4, 6, and 10-17 from the 5′ end of the first nucleotide sequence; and (b) an antisense strand comprising a second nucleotide sequence consisting of 17 to 23 nucleotides. In some embodiments, 2′-fluoro nucleotides are at positions 2, 6, 14, and 16 from the 5′ end of the second nucleotide sequence, and wherein 2′-O methyl nucleotides are at positions 1, 3-5, 7-13, 15, and 17 from the 5′ end the second nucleotide sequence. In some embodiments, the nucleotides in the second nucleotide sequence are arranged in an alternating 1:3 modification pattern, and wherein 1 nucleotide is a 2′-fluoro nucleotide and 3 nucleotides are 2′-O methyl nucleotides. In some embodiments, the nucleotides in the second nucleotide sequence are arranged in an alternating 1:2 modification pattern, and wherein 1 nucleotide is a 2′-fluoro nucleotide and 2 nucleotides are 2′-O methyl nucleotides. In any embodiment, first nucleotide sequence consists of 19 nucleotides. In any embodiment, 2′-O methyl nucleotides are at positions 18 and 19 from the 5′ end of the first nucleotide sequence. In any embodiment, the second nucleotide sequence consists of 21 nucleotides. In any embodiment, 2′-O methyl nucleotides are at positions 18-21 or 19-21 from the 5′ end of the second nucleotide sequence. As shown in FIG. 3F, a ds-siNA may comprise (a) a sense strand consisting of 19 nucleotides, wherein 2′-fluoro nucleotides are at positions 5 and 7-9 from the 5′ end of the sense strand, and wherein 2′-O methyl nucleotides are at positions 1-4, 6, and 10-19 from the 5′ end of the sense strand; (b) an antisense strand consisting of 21 nucleotides, wherein 2′-fluoro nucleotides are at positions 2, 6, 14, and 16 from the 5′ end of the antisense strand, and wherein 2′-O methyl nucleotides are at positions 1, 3-5, 7-13, 15, and 17-21 from the 5′ end of the antisense strand. The ds-siNA may further comprise a conjugated moiety attached to the 3′ end of the sense strand. The ds-siNA may further comprise (i) phosphorothioate internucleoside linkages between the nucleotides at positions 1 and 2 and positions 2 and 3 from the 5′ end of the sense strand; and (ii) phosphorothioate internucleoside linkages between the nucleotides at positions 1 and 2; positions 2 and 3; positions 19 and 20; and positions 20 and 21 from the 5′ end of the antisense strand. In some embodiments, at least 1, 2, 3, 4 or more 2′-fluoro nucleotides on the sense strand or antisense strand is a fB, fN, f(4nh)Q, f4P, or f2P nucleotide. In some embodiments, at least 1, 2, 3, 4 or more 2′-fluoro nucleotides on the sense strand or antisense strand is a f4P nucleotide. In some embodiments, at least 1, 2, 3, or 4 of the 2′-fluoro-nucleotides at positions 2, 6, 14, and 16 from the 5′ end of the antisense strand is a f4P nucleotide. In some embodiments, at least one of the 2′-fluoro-nucleotides at positions 2, 6, 14, and 16 from the 5′ end of the antisense strand is a f4P nucleotide. In some embodiments, at least two of the 2′-fluoro-nucleotides at positions 2, 6, 14, and 16 from the 5′ end of the antisense strand is a f4P nucleotide. In some embodiments, less than or equal to 3 of the 2′-fluoro-nucleotides at positions 2, 6, 14, and 16 from the 5′ end of the antisense strand is a f4P nucleotide. In some embodiments, less than or equal to 2 of the 2′-fluoro-nucleotides at positions 2, 6, 14, and 16 from the 5′ end of the antisense strand is a f4P nucleotide. In some embodiments, the 2′-fluoro-nucleotide at position 2 from the 5′ end of the antisense strand is a f4P nucleotide. In some embodiments, the 2′-fluoro-nucleotide at position 6 from the 5′ end of the antisense strand is a f4P nucleotide. In some embodiments, the 2′-fluoro-nucleotide at position 14 from the 5′ end of the antisense strand is a f4P nucleotide. In some embodiments, the 2′-fluoro-nucleotide at position 16 from the 5′ end of the antisense strand is a f4P nucleotide. In some embodiments, at least 1, 2, 3, 4 or more 2′-fluoro nucleotides on the sense strand or antisense strand is a f2P nucleotide. In some embodiments, at least 1, 2, 3, or 4 of the 2′-fluoro-nucleotides at positions 2, 6, 14, and 16 from the 5′ end of the antisense strand is a f2P nucleotide. In some embodiments, at least one of the 2′-fluoro-nucleotides at positions 2, 6, 14, and 16 from the 5′ end of the antisense strand is a f2P nucleotide. In some embodiments, at least two of the 2′-fluoro-nucleotides at positions 2, 6, 14, and 16 from the 5′ end of the antisense strand is a f2P nucleotide. In some embodiments, less than or equal to 3 of the 2′-fluoro-nucleotides at positions 2, 6, 14, and 16 from the 5′ end of the antisense strand is a f2P nucleotide. In some embodiments, less than or equal to 2 of the 2′-fluoro-nucleotides at positions 2, 6, 14, and 16 from the 5′ end of the antisense strand is a f2P nucleotide. In some embodiments, the 2′-fluoro-nucleotide at position 2 from the 5′ end of the antisense strand is a f2P nucleotide. In some embodiments, the 2′-fluoro-nucleotide at position 6 from the 5′ end of the antisense strand is a f2P nucleotide. In some embodiments, the 2′-fluoro-nucleotide at position 14 from the 5′ end of the antisense strand is a f2P nucleotide. In some embodiments, the 2′-fluoro-nucleotide at position 16 from the 5′ end of the antisense strand is a f2P nucleotide. In some embodiments, the 2′-O methyl nucleotide at position 1 from the 5′ end of the sense strand is further modified to contain a 5′ stabilizing end cap. In some embodiments, the 2′-O methyl nucleotide at position 1 from the 5′ end of the antisense strand is further modified to contain a 5′ stabilizing end cap. In some embodiments, the 2′-O methyl nucleotide at position 1 from the 5′ end of the sense strand is further modified to contain a phosphorylation blocker. In some embodiments, the 2′-O methyl nucleotide at position 1 from the 3′ end of the sense strand is further modified to contain a phosphorylation blocker. In some embodiments, the 2′-O methyl nucleotide at position 1 from the 5′ end of the antisense strand is further modified to contain a phosphorylation blocker. In some embodiments, the 2′-O methyl nucleotide at position 1 from the 3′ end of the antisense strand is further modified to contain a phosphorylation blocker. In some embodiments, the 2′-O methyl nucleotide at position 1 from the 5′ end of the sense strand is a d2vd3 nucleotide, a d2vd3U nucleotide, an omeco-d3 nucleotide, an omeco-d3U nucleotide, a 4 h nucleotide, a 4hU nucleotide, a v-mun nucleotide, a c20-4 h nucleotide, an omeco-munb nucleotide, a d2vm nucleotide, or a d2vmA nucleotide. In some embodiments, the 2′-O methyl nucleotide at position 1 from the 5′ end of the antisense strand is a d2vd3 nucleotide, a d2vd3U nucleotide, an omeco-d3 nucleotide, an omeco-d3U nucleotide, a 4 h nucleotide, a 4hU nucleotide, a v-mun nucleotide, a c20-4 h nucleotide, an omeco-munb nucleotide, a d2vm nucleotide, or a d2vmA nucleotide. In some embodiments, the 2′-O methyl nucleotide at position 1 from the 3′ end of the sense strand is a d2vd3 nucleotide, a d2vd3U nucleotide, an omeco-d3 nucleotide, an omeco-d3U nucleotide, a 4 h nucleotide, a 4hU nucleotide, a v-mun nucleotide, a c20-4 h nucleotide, an omeco-munb nucleotide, a d2vm nucleotide, or a d2vmA nucleotide. In some embodiments, the 2′-O methyl nucleotide at position 1 from the 3′ end of the antisense strand is a d2vd3 nucleotide, a d2vd3U nucleotide, an omeco-d3 nucleotide, an omeco-d3U nucleotide, a 4 h nucleotide, a 4hU nucleotide, a v-mun nucleotide, a c20-4 h nucleotide, an omeco-munb nucleotide, a d2vm nucleotide, or a d2vmA nucleotide. In some embodiments, at least 1, 2, 3, 4 or more 2′-fluoro nucleotides on the sense strand or antisense strand is a 2′-fluoro nucleotide mimic. In some embodiments, at least 1, 2, 3, 4 or more 2′-fluoro nucleotides on the sense strand is a fB, fN, f(4nh)Q, f4P, or f2P nucleotide. In some embodiments, at least 1, 2, 3, 4 or more 2′-fluoro nucleotides on the antisense strand is a fB, fN, f(4nh)Q, f4P, or f2P nucleotide. In some embodiments, at least 1, 2, 3, 4 or more 2′-O methyl nucleotide on the sense or antisense strand is a 2′-O methyl nucleotide mimic. In some embodiments, one or more nucleotides in the sense strand and/or the antisense strand may be a 3′,4′ seco modified nucleotide in which the bond between the 3′ and 4′ positions of the furanose ring is broken (e.g., mun34).

[0260] In some embodiments, the (a) a sense strand comprising a first nucleotide sequence consisting of 17 to 23 nucleotides, wherein 2′-fluoro nucleotides are at positions 5, 9-11, and 14 from the 5′ end of the first nucleotide sequence, and wherein 2′-O methyl nucleotides are at positions 1-4, 6-8, 12, 13, and 15-17 from the 5′ end of the first nucleotide sequence; and (b) an antisense strand comprising a second nucleotide sequence consisting of 17 to 23 nucleotides. In some embodiments, 2′-fluoro nucleotides are at positions 2 and 14 from the 5′ end of the second nucleotide sequence, and wherein 2′-O methyl nucleotides are at positions 1, 3-13, and 15-17 from the 5′ end the second nucleotide sequence. In some embodiments, the nucleotides in the second nucleotide sequence are arranged in an alternating 1:3 modification pattern, and wherein 1 nucleotide is a 2′-fluoro nucleotide and 3 nucleotides are 2′-O methyl nucleotides. In some embodiments, the nucleotides in the second nucleotide sequence are arranged in an alternating 1:2 modification pattern, and wherein 1 nucleotide is a 2′-fluoro nucleotide and 2 nucleotides are 2′-O methyl nucleotides. In any embodiment, the first nucleotide sequence consists of 21 nucleotides. In any embodiment, 2′-O methyl nucleotides are at positions 18, 20, and 21 from the 5′ end of the first nucleotide sequence. In any embodiment, 2′-fluoro nucleotide is at position 19 from the 5′ end of the first nucleotide sequence. In any embodiment, the second nucleotide sequence consists of 23 nucleotides. In any embodiment, 2′-O methyl nucleotides are at positions 18-23 from the 5′ end of the second nucleotide sequence. As shown in FIG. 3G, a ds-siNA may comprise (a) a sense strand consisting of 21 nucleotides, wherein 2′-fluoro nucleotides are at positions 5, 9-11, 14, and 19 from the 5′ end of the sense strand, and wherein 2′-O methyl nucleotides are at positions 1-4, 6-8, 12, 13, 15-18, 20, and 21 from the 5′ end of the sense strand; and (b) an antisense strand consisting of 23 nucleotides, wherein 2′-flouro nucleodies are at positions 2 and 14 from the 5′ end of the antisense strand, and wherein 2′-O methyl nucleotides are at positions 1, 3-13, and 15-23 from the 5′ end of the antisense strand. The ds-siNA may further comprise a conjugated moiety attached to the 3′ end of the sense strand. The ds-siNA may further comprise (i) phosphorothioate internucleoside linkages between the nucleotides at positions 1 and 2 and positions 2 and 3 from the 5′ end of the sense strand; and (ii) phosphorothioate internucleoside linkages between the nucleotides at positions 1 and 2; positions 2 and 3; positions 19 and 20; and positions 20 and 21 from the 5′ end of the antisense strand. In some embodiments, the 2′-O methyl nucleotide at position 1 from the 5′ end of the sense strand is further modified to contain a 5′ stabilizing end cap. In some embodiments, the 2′-O methyl nucleotide at position 1 from the 5′ end of the antisense strand is further modified to contain a 5′ stabilizing end cap. In some embodiments, the 2′-O methyl nucleotide at position 1 from the 5′ end of the sense strand is further modified to contain a phosphorylation blocker. In some embodiments, the 2′-O methyl nucleotide at position 1 from the 3′ end of the sense strand is further modified to contain a phosphorylation blocker. In some embodiments, the 2′-O methyl nucleotide at position 1 from the 5′ end of the antisense strand is further modified to contain a phosphorylation blocker. In some embodiments, the 2′-O methyl nucleotide at position 1 from the 3′ end of the antisense strand is further modified to contain a phosphorylation blocker. In some embodiments, the 2′-O methyl nucleotide at position 1 from the 5′ end of the sense strand is a d2vd3 nucleotide, a d2vd3U nucleotide, an omeco-d3 nucleotide, an omeco-d3U nucleotide, a 4 h nucleotide, a 4hU nucleotide, a v-mun nucleotide, a c20-4 h nucleotide, an omeco-munb nucleotide, a d2vm nucleotide, or a d2vmA nucleotide. In some embodiments, the 2′-O methyl nucleotide at position 1 from the 5′ end of the antisense strand is a d2vd3 nucleotide, a d2vd3U nucleotide, an omeco-d3 nucleotide, an omeco-d3U nucleotide, a 4 h nucleotide, a 4hU nucleotide, a v-mun nucleotide, a c20-4 h nucleotide, an omeco-munb nucleotide, a d2vm nucleotide, or a d2vmA nucleotide. In some embodiments, the 2′-O methyl nucleotide at position 1 from the 3′ end of the sense strand is a d2vd3 nucleotide, a d2vd3U nucleotide, an omeco-d3 nucleotide, an omeco-d3U nucleotide, a 4 h nucleotide, a 4hU nucleotide, a v-mun nucleotide, a c20-4 h nucleotide, an omeco-munb nucleotide, a d2vm nucleotide, or a d2vmA nucleotide. In some embodiments, the 2′-O methyl nucleotide at position 1 from the 3′ end of the antisense strand is a d2vd3 nucleotide, a d2vd3U nucleotide, an omeco-d3 nucleotide, an omeco-d3U nucleotide, a 4 h nucleotide, a 4hU nucleotide, a v-mun nucleotide, a c20-4 h nucleotide, an omeco-munb nucleotide, a d2vm nucleotide, or a d2vmA nucleotide. In some embodiments, at least 1, 2, 3, 4 or more 2′-fluoro nucleotides on the sense strand or antisense strand is a 2′-fluoro nucleotide mimic. In some embodiments, at least 1, 2, 3, 4 or more 2′-fluoro nucleotides on the sense strand is a fB, fN, f(4nh)Q, f4P, or f2P nucleotide. In some embodiments, at least 1, 2, 3, 4 or more 2′-fluoro nucleotides on the antisense strand is a fB, fN, f(4nh)Q, f4P, or f2P nucleotide. In some embodiments, at least 1, 2, 3, 4 or more 2′-O methyl nucleotide on the sense or antisense strand is a 2′-O methyl nucleotide mimic. In some embodiments, one or more nucleotides in the sense strand and/or the antisense strand may be a 3′,4′ seco modified nucleotide in which the bond between the 3′ and 4′ positions of the furanose ring is broken (e.g., mun34).

[0261] In some embodiments, the (a) a sense strand comprising a first nucleotide sequence consisting of 17 to 23 nucleotides, wherein 2′-fluoro nucleotides are at positions 7 and 9-11 from the 5′ end of the first nucleotide sequence, and wherein 2′-O methyl nucleotides are at positions 1-6, 8, and 12-17 from the 5′ end of the first nucleotide sequence; and (b) an antisense strand comprising a second nucleotide sequence consisting of 17 to 23 nucleotides. In some embodiments, 2′-fluoro nucleotides are at positions 2, 6, 14, and 16 from the 5′ end of the second nucleotide sequence, and wherein 2′-O methyl nucleotides are at positions 1, 3-5, 7-13, 15, and 17 from the 5′ end the second nucleotide sequence. In some embodiments, the nucleotides in the second nucleotide sequence are arranged in an alternating 1:3 modification pattern, and wherein 1 nucleotide is a 2′-fluoro nucleotide and 3 nucleotides are 2′-O methyl nucleotides. In some embodiments, the nucleotides in the second nucleotide sequence are arranged in an alternating 1:2 modification pattern, and wherein 1 nucleotide is a 2′-fluoro nucleotide and 2 nucleotides are 2′-O methyl nucleotides. In any embodiment, the first nucleotide sequence consists of 21 nucleotides. In any embodiment, 2′-O methyl nucleotides are at positions 18-21 from the 5′ end of the first nucleotide sequence. In any embodiment, the second nucleotide sequence consists of 23 nucleotides. In any embodiment, 2′-O methyl nucleotides are at positions 18-21 from the 5′ end of the second nucleotide sequence. As shown in FIG. 3H, a ds-siNA may comprise (a) a sense strand consisting of 21 nucleotides, wherein 2′-fluoro nucleotides are at positions 7 and 9-11 from the 5′ end of the sense strand, and wherein 2′-O methyl nucleotides are at positions 1-6, 8, and 12-21 from the 5′ end of the sense strand; and (b) an antisense strand consisting of 23 nucleotides, wherein 2′-flouro nucleodies are at positions 2, 6, 14, and 16 from the 5′ end of the antisense strand, and wherein 2′-O methyl nucleotides are at positions 1, 3-5, 7-13, 15, and 17-23 from the 5′ end of the antisense strand. Optionally, the nucleotides at positions 22 and 23 from the 5′ end of the antisense strand may be unlocked nucleotides. Optionally, the ds-siNA may further comprise a conjugated moiety attached to the 3′ end of the sense strand (not pictured). The ds-siNA may comprise a stabilizing end cap attached to the 5′ end of the antisense strand (pictured). The ds-siNA may further comprise (i) phosphorothioate internucleoside linkages between the nucleotides at positions 1 and 2, positions 2 and 3, and positions 20 and 21 from the 5′ end of the sense strand; and (ii) phosphorothioate internucleoside linkages between the nucleotides at positions 1 and 2; positions 2 and 3; positions 21 and 22, and positions 22 and 23 from the 5′ end of the antisense strand. In some embodiments, the 2′-O methyl nucleotide at position 1 from the 5′ end of the sense strand is further modified to contain a 5′ stabilizing end cap. In some embodiments, the 2′-O methyl nucleotide at position 1 from the 5′ end of the antisense strand is further modified to contain a 5′ stabilizing end cap. In some embodiments, the 2′-O methyl nucleotide at position 1 from the 5′ end of the sense strand is further modified to contain a phosphorylation blocker. In some embodiments, the 2′-O methyl nucleotide at position 1 from the 3′ end of the sense strand is further modified to contain a phosphorylation blocker. In some embodiments, the 2′-O methyl nucleotide at position 1 from the 5′ end of the antisense strand is further modified to contain a phosphorylation blocker. In some embodiments, the 2′-O methyl nucleotide at position 1 from the 3′ end of the antisense strand is further modified to contain a phosphorylation blocker. In some embodiments, the 2′-O methyl nucleotide at position 1 from the 5′ end of the sense strand is a d2vd3 nucleotide, a d2vd3U nucleotide, an omeco-d3 nucleotide, an omeco-d3U nucleotide, a 4 h nucleotide, a 4hU nucleotide, a v-mun nucleotide, a c20-4 h nucleotide, an omeco-munb nucleotide, a d2vm nucleotide, or a d2vmA nucleotide, a d2vd3U nucleotide, an omeco-d3U nucleotide, a 4hU nucleotide, a v-mun nucleotide, a c20-4 h nucleotide, an omeco-munb nucleotide, or a d2vmA nucleotide. In some embodiments, the 2′-O methyl nucleotide at position 1 from the 5′ end of the antisense strand is a d2vd3 nucleotide, a d2vd3U nucleotide, an omeco-d3 nucleotide, an omeco-d3U nucleotide, a 4 h nucleotide, a 4hU nucleotide, a v-mun nucleotide, a c20-4 h nucleotide, an omeco-munb nucleotide, a d2vm nucleotide, or a d2vmA nucleotide. In some embodiments, the 2′-O methyl nucleotide at position 1 from the 3′ end of the sense strand is a d2vd3 nucleotide, a d2vd3U nucleotide, an omeco-d3 nucleotide, an omeco-d3U nucleotide, a 4 h nucleotide, a 4hU nucleotide, a v-mun nucleotide, a c20-4 h nucleotide, an omeco-munb nucleotide, a d2vm nucleotide, or a d2vmA nucleotide. In some embodiments, the 2′-O methyl nucleotide at position 1 from the 3′ end of the antisense strand is a d2vd3 nucleotide, a d2vd3U nucleotide, an omeco-d3 nucleotide, an omeco-d3U nucleotide, a 4 h nucleotide, a 4hU nucleotide, a v-mun nucleotide, a c20-4 h nucleotide, an omeco-munb nucleotide, a d2vm nucleotide, or a d2vmA nucleotide. In some embodiments, at least 1, 2, 3, 4 or more 2′-fluoro nucleotides on the sense strand or antisense strand is a 2′-fluoro nucleotide mimic. In some embodiments, at least 1, 2, 3, 4 or more 2′-fluoro nucleotides on the sense strand is a fB, fN, f(4nh)Q, f4P, or f2P nucleotide. In some embodiments, at least 1, 2, 3, 4 or more 2′-fluoro nucleotides on the antisense strand is a fB, fN, f(4nh)Q, f4P, or f2P nucleotide. In some embodiments, at least 1, 2, 3, 4 or more 2′-O methyl nucleotide on the sense or antisense strand is a 2′-O methyl nucleotide mimic. In some embodiments, one or more nucleotides in the sense strand and/or the antisense strand may be a 3′,4′ seco modified nucleotide in which the bond between the 3′ and 4′ positions of the furanose ring is broken (e.g., mun34).

[0262] Any of the siNAs disclosed herein may comprise a sense strand and an antisense strand. The sense strand may comprise a first nucleotide sequence that is 15 to 30 nucleotides in length. The antisense strand may comprise a second nucleotide sequence that is 15 to 30 nucleotides in length.

[0263] In some embodiments, the double-stranded short interfering nucleic acid (ds-siNA) molecule comprises: (a) a sense strand wherein at least one modified nucleotide is a 2′-O methyl nucleotide and the nucleotide at position 3, 5, 7, 8, 9, 10, 11, 12, 14, 17, and/or 19 from the 5′ end of the first nucleotide sequence is a 2′-fluoro nucleotide. In some embodiments, the double-stranded short interfering nucleic acid (ds-siNA) molecule comprises: (a) a sense strand wherein at least one modified nucleotide is a 2′-O methyl nucleotide and the nucleotide at position 7 from the 5′ end of the first nucleotide sequence is a 2′-fluoro nucleotide. In some embodiments, the double-stranded short interfering nucleic acid (ds-siNA) molecule comprises: (a) a sense strand wherein at least one modified nucleotide is a 2′-O methyl nucleotide and the nucleotide at position 7, 9, 10, and/or 11 from the 5′ end of the first nucleotide sequence is a 2′-fluoro nucleotide.

[0264] In some embodiments, the double-stranded short interfering nucleic acid (ds-siNA) molecule comprises: (b) an antisense strand wherein at least one modified nucleotide is a 2′-O methyl nucleotide and the nucleotide at position 2, 5, 6, 8, 10, 14, 16, 17, and/or 18 from the 5′ end of the second nucleotide sequence is a 2′-fluoro nucleotide. In some embodiments, the double-stranded short interfering nucleic acid (ds-siNA) molecule comprises: (b) an antisense strand wherein at least one modified nucleotide is a 2′-O methyl nucleotide and the nucleotide at position 2 of the second nucleotide sequence is a 2′-fluoro nucleotide.

[0265] In any embodiment, the ds-siNA molecule comprises 1 or more phosphorothioate internucleoside linkage. In any embodiment, the ds-siNA molecule comprises 1 or more mesyl phosphoroamidate internucleoside linkage. In any embodiment, the ds-siNA molecule may further comprise a phosphorylation blocker, a galactosamine, 5′-stabilized end cap, conjugated moiety, destabilized nucleotide, modified nucleotide, thermally destabilized nucleotide, or a combination to two or more thereof. In some embodiments, the sense strand further comprises a phosphorylation blocker or a galactosamine. In some embodiments, the antisense strand further comprises a 5′-stabilized end cap. In some embodiments, the sense strand further comprises a phosphorylation blocker or a galactosamine and the antisense strand further comprises a 5′-stabilized end cap.

[0266] The present technology provides compositions comprising one or more of the siNA molecules described herein. The present technology also provides compositions comprising two or more of the siNA molecules described herein.

[0267] The present technology provides compositions comprising any of the siNA molecule described and a pharmaceutically acceptable carrier or diluent.

[0268] The present technology provides compositions comprising two or more of the siNA molecules described herein for use as a medicament.

[0269] The present technology provides compositions comprising any of the siNA molecule described and a pharmaceutically acceptable carrier or diluent for use as a medicament.

[0270] The present technology provides methods of treating a disease in a subject in need thereof, the method comprising administering to the subject any of the siNA molecules described herein.

[0271] The present technology provides uses of any of the siNA molecules described herein in the manufacture of a medicament for treating a disease.

Short Interfering Nucleic Acid (siNA) Molecules

[0272] As indicated above, the present disclosure provides siNA molecules comprising modified nucleotides. Any of the siNA molecules described herein may be double-stranded siNA (ds-siNA) molecules. The terms “siNA molecules” and “ds-siNA molecules” may be used interchangeably. In some embodiments, the ds-siNA molecules comprise a sense strand and an antisense strand. The siNA may comprise any of the first nucleotide, second nucleotide, sense strand, or antisense strand sequences disclosed herein. The siNA may comprise 5 to 100, 5 to 90, 10 to 100, 10 to 90, 10 to 80, 10 to 70, 10 to 60, 10 to 50, 10 to 30, 10 to 25, 15 to 100, 15 to 90, 15 to 80, 15 to 70, 15 to 60, 15 to 50, 15 to 30, or 15 to 25 nucleotides. The siNA may comprise at least 5, 10, 11, 12, 13, 14, 15, 16, 17, 18, 19, 20, 21, 22, 23, 24, 25, 26, 27, 28, 29, 30, 31, 32, 33, 34, 35, 36, 37, 38, 39, or 40 nucleotides. The siNA may comprise less than or equal to 50, 45, 40, 39, 38, 37, 36, 35, 34, 33, 32, 31, 30, 29, 28, 27, 26, 25, 24, 23, 22, 21, 20, or 19 nucleotides. The nucleotides may be modified nucleotides. The siNA may be single stranded. The siNA may be double stranded.

siNA Sense Strand

[0273] Any of the siNA molecules described herein may comprise a sense strand. The sense strand may comprise a first nucleotide sequence. The first nucleotide sequence may be 15 to 30, 15 to 25, 15 to 23, 17 to 23, 19 to 23, or 19 to 21 nucleotides in length. In some embodiments, the first nucleotide sequence is 15, 16, 17, 18, 19, 20, 21, 22, 23, 24, 25, 26, 27, 28, 29, or 30 nucleotides in length. In some embodiments, the first nucleotide sequence is at least 19 nucleotides in length. In some embodiments, the first nucleotide sequence is at least 21 nucleotides in length.

[0274] In some embodiments, the sense strand is the same length as the first nucleotide sequence. In some embodiments, the sense strand is longer than the first nucleotide sequence. In some embodiments, the sense strand may further comprise 1, 2, 3, 4, or 5 or more nucleotides than the first nucleotide sequence. In some embodiments, the sense strand may further comprise a deoxyribonucleic acid (DNA). In some embodiments, the DNA is thymine (T). In some embodiments, the sense strand may further comprise a TT sequence. In some embodiments, the sense strand may further comprise one or more modified nucleotides that are adjacent to the first nucleotide sequence. In some embodiments, the one or more modified nucleotides are independently selected from any of the modified nucleotides disclosed herein (e.g., 2′-fluoro nucleotide, 2′-O methyl nucleotide, 2′-fluoro nucleotide mimic, 2′-O methyl nucleotide mimic, or a nucleotide comprising a modified nucleobase).

[0275] In some embodiments, the first nucleotide sequence comprises 15, 16, 17, 18, 19, 20, 21, 22, 23, or more modified nucleotides independently selected from a 2′-O methyl nucleotide and a 2′-fluoro nucleotide. In some embodiments, the first nucleotide sequence comprises 16, 17, 18, 19, 20, 21, 22, 23, or more modified nucleotides independently selected from a 2′-O methyl nucleotide and a 2′-fluoro nucleotide. In some embodiments, 70%, 75%, 80%, 85%, 90%, 95% or 100% of the nucleotides in the first nucleotide sequence are modified nucleotides independently selected from a 2′-O methyl nucleotide and a 2′-fluoro nucleotide. In some embodiments, 100% of the nucleotides in the first nucleotide sequence are modified nucleotides independently selected from a 2′-O methyl nucleotide and a 2′-fluoro nucleotide. In some embodiments, the 2′-O methyl nucleotide is a 2′-O methyl nucleotide mimic. In some embodiments, the 2′-fluoro nucleotide is a 2′-fluoro nucleotide mimic.

[0276] In some embodiments, between about 15 to 30, 15 to 25, 15 to 24, 15 to 23, 15 to 22, 15 to 21, 17 to 30, 17 to 25, 17 to 24, 17 to 23, 17 to 22, 17 to 21, 18 to 30, 18 to 25, 18 to 24, 18 to 23, 18 to 22, 18 to 21, 19 to 30, 19 to 25, 19 to 24, 19 to 23, 19 to 22, 19 to 21, 20 to 25, 20 to 24, 20 to 23, 21 to 25, 21 to 24, or 21 to 23 modified nucleotides of the first nucleotide sequence are 2′-O methyl nucleotides. In some embodiments, between about 2 to 20 modified nucleotides of the first nucleotide sequence are 2′-O methyl nucleotides. In some embodiments, between about 5 to 25 modified nucleotides of the first nucleotide sequence are 2′-O methyl nucleotides. In some embodiments, between about 10 to 25 modified nucleotides of the first nucleotide sequence are 2′-O methyl nucleotides. In some embodiments, between about 12 to 25 modified nucleotides of the first nucleotide sequence are 2′-O methyl nucleotides. In some embodiments, at least about 10, 11, 12, 13, 14, 15, 16, 17, 18, 19, 20, 21, or 22 modified nucleotides of the first nucleotide sequence are 2′-O methyl nucleotides. In some embodiments, at least about 12 modified nucleotides of the first nucleotide sequence are 2′-O methyl nucleotides. In some embodiments, at least about 13 modified nucleotides of the first nucleotide sequence are 2′-O methyl nucleotides. In some embodiments, at least about 14 modified nucleotides of the first nucleotide sequence are 2′-O methyl nucleotides. In some embodiments, at least about 15 modified nucleotides of the first nucleotide sequence are 2′-O methyl nucleotides. In some embodiments, at least about 16 modified nucleotides of the first nucleotide sequence are 2′-O methyl nucleotides. In some embodiments, at least about 17 modified nucleotides of the first nucleotide sequence are 2′-O methyl nucleotides. In some embodiments, at least about 18 modified nucleotides of the first nucleotide sequence are 2′-O methyl nucleotides. In some embodiments, at least about 19 modified nucleotides of the first nucleotide sequence are 2′-O methyl nucleotides. In some embodiments, less than or equal to 25, 24, 23, 22, 21, 20, 19, 18, 17, 16, 15, 14, 13, 12, 11, 10, 9, 8, 7, 6, 5, 4, 3, or 2 modified nucleotides of the first nucleotide sequence are 2′-O methyl nucleotides. In some embodiments, less than or equal to 21 modified nucleotides of the first nucleotide sequence are 2′-O methyl nucleotides. In some embodiments, less than or equal to 20 modified nucleotides of the first nucleotide sequence are 2′-O methyl nucleotides. In some embodiments, less than or equal to 19 modified nucleotides of the first nucleotide sequence are 2′-O methyl nucleotides. In some embodiments, less than or equal to 18 modified nucleotides of the first nucleotide sequence are 2′-O methyl nucleotides. In some embodiments, less than or equal to 17 modified nucleotides of the first nucleotide sequence are 2′-O methyl nucleotides. In some embodiments, less than or equal to 16 modified nucleotides of the first nucleotide sequence are 2′-O methyl nucleotides. In some embodiments, less than or equal to 15 modified nucleotides of the first nucleotide sequence are 2′-O methyl nucleotides. In some embodiments, less than or equal to 14 modified nucleotides of the first nucleotide sequence are 2′-O methyl nucleotides. In some embodiments, less than or equal to 13 modified nucleotides of the first nucleotide sequence are 2′-O methyl nucleotides. In some embodiments, at least one modified nucleotide of the first nucleotide sequence is a 2′-O methyl pyrimidine. In some embodiments, at least 5, 6, 7, 8, 9, or 10 modified nucleotides of the first nucleotide sequence are 2′-O methyl pyrimidines. In some embodiments, at least one modified nucleotide of the first nucleotide sequence is a 2′-O methyl purine. In some embodiments, at least 5, 6, 7, 8, 9, or 10 modified nucleotides of the first nucleotide sequence are 2′-O methyl purines. In some embodiments, the 2′-O methyl nucleotide is a 2′-O methyl nucleotide mimic.

[0277] In some embodiments, between 2 to 15 modified nucleotides of the first nucleotide sequence are 2′-fluoro nucleotides. In some embodiments, between 2 to 10 modified nucleotides of the first nucleotide sequence are 2′-fluoro nucleotides. In some embodiments, between 2 to 6 modified nucleotides of the first nucleotide sequence are 2′-fluoro nucleotides. In some embodiments, 1 to 6, 1 to 5, 1 to 4, or 1 to 3 modified nucleotides of the first nucleotide sequence are 2′-fluoro nucleotides. In some embodiments, at least 1, 2, 3, 4, 5, or 6 modified nucleotides of the first nucleotide sequence are 2′-fluoro nucleotides. In some embodiments, at least 2, 3, 4, 5, or 6 modified nucleotides of the first nucleotide sequence are 2′-fluoro nucleotides. In some embodiments, at least 1 modified nucleotide of the first nucleotide sequence is a 2′-fluoro nucleotide. In some embodiments, at least 2 modified nucleotides of the first nucleotide sequence are 2′-fluoro nucleotides. In some embodiments, at least 3 modified nucleotides of the first nucleotide sequence are 2′-fluoro nucleotides. In some embodiments, at least 4 modified nucleotides of the first nucleotide sequence are 2′-fluoro nucleotides. In some embodiments, at least 5 modified nucleotides of the first nucleotide sequence are 2′-fluoro nucleotides. In some embodiments, at least 6 modified nucleotides of the first nucleotide sequence are 2′-fluoro nucleotides. In some embodiments, 10, 9, 8, 7, 6, 5, 4, 3 or fewer modified nucleotides of the first nucleotide sequence are 2′-fluoro nucleotides. In some embodiments, 10, 9, 8, 7, 6, 5, 4, 3, or 2 modified nucleotides of the first nucleotide sequence are 2′-fluoro nucleotides. In some embodiments, 10 or fewer modified nucleotides of the first nucleotide sequence are 2′-fluoro nucleotides. In some embodiments, 7 or fewer modified nucleotides of the first nucleotide sequence are 2′-fluoro nucleotides. In some embodiments, 6 or fewer modified nucleotides of the first nucleotide sequence are 2′-fluoro nucleotides. In some embodiments, 5 or fewer modified nucleotides of the first nucleotide sequence are 2′-fluoro nucleotides. In some embodiments, 4 or fewer modified nucleotides of the first nucleotide sequence are 2′-fluoro nucleotides. In some embodiments, 3 or fewer modified nucleotides of the first nucleotide sequence are 2′-fluoro nucleotides. In some embodiments, 2 or fewer modified nucleotides of the first nucleotide sequence are 2′-fluoro nucleotides. In some embodiments, at least one modified nucleotide of the first nucleotide sequence is a 2′-fluoro pyrimidine. In some embodiments, 1, 2, 3, 4, 5, or 6 modified nucleotides of the first nucleotide sequence are 2′-fluoro pyrimidines. In some embodiments, at least one modified nucleotide of the first nucleotide sequence is a 2′-fluoro purine. In some embodiments, 1, 2, 3, 4, 5, or 6 modified nucleotides of the first nucleotide sequence are 2′-fluoro purines. In some embodiments, the 2′-fluoro nucleotide is a 2′-fluoro nucleotide mimic.

[0278] In some embodiments, the nucleotide at position 3, 5, 7, 8, 9, 10, 11, 12, 14, 17, and/or 19 from the 5′ end of the first nucleotide sequence is a 2′-fluoro nucleotide. In some embodiments, at least two nucleotides at positions 3, 5, 7, 8, 9, 10, 11, 12, 14, 17, and/or 19 from the 5′ end of the first nucleotide sequence are 2′-fluoro nucleotides. In some embodiments, at least three nucleotides at positions 3, 5, 7, 8, 9, 10, 11, 12, 14, 17, and/or 19 from the 5′ end of the first nucleotide sequence are 2′-fluoro nucleotides. In some embodiments, at least four nucleotides at positions 3, 5, 7, 8, 9, 10, 11, 12, 14, 17, and/or 19 from the 5′ end of the first nucleotide sequence are 2′-fluoro nucleotides. In some embodiments, at least five nucleotides at positions 3, 5, 7, 8, 9, 10, 11, 12, 14, 17, and/or 19 from the 5′ end of the first nucleotide sequence are 2′-fluoro nucleotides. In some embodiments, the nucleotides at positions 3, 5, 7, 8, 9, 10, 11, 12, 14, 17, and/or 19 from the 5′ end of the first nucleotide sequence are 2′-fluoro nucleotides. In some embodiments, the nucleotide at position 3 from the 5′ end of the first nucleotide sequence is a 2′-fluoro nucleotide. In some embodiments, the nucleotide at position 7 from the 5′ end of the first nucleotide sequence is a 2′-fluoro nucleotide. In some embodiments, the nucleotide at position 8 from the 5′ end of the first nucleotide sequence is a 2′-fluoro nucleotide. In some embodiments, the nucleotide at position 9 from the 5′ end of the first nucleotide sequence is a 2′-fluoro nucleotide. In some embodiments, the nucleotide at position 12 from the 5′ end of the first nucleotide sequence is a 2′-fluoro nucleotide. In some embodiments, the nucleotide at position 17 from the 5′ end of the first nucleotide sequence is a 2′-fluoro nucleotide. In some embodiments, the 2′-fluoro nucleotide is a 2′-fluoro nucleotide mimic.

[0279] In some embodiments, at least 1, 2, 3, 4, 5, 6, or 7 nucleotides at position 3, 5, 7, 8, 9, 10, 11, 12, 14, 17, and/or 19 from the 5′ end of the first nucleotide sequence is a 2′-fluoro nucleotide. In some embodiments, the nucleotide at positions 3, 5, 7, 8, 9, 10, 11, 12, 14, 17, and/or 19 from the 5′ end of the first nucleotide sequence is a 2′-fluoro nucleotide. In some embodiments, at least two nucleotides at positions 3, 5, 7, 8, 9, 10, 11, 12, 14, 17, and/or 19 from the 5′ end of the first nucleotide sequence are 2′-fluoro nucleotides. In some embodiments, at least three nucleotides at positions 3, 5, 7, 8, 9, 10, 11, 12, 14, 17, and/or 19 from the 5′ end of the first nucleotide sequence are 2′-fluoro nucleotides. In some embodiments, the nucleotides at positions 3, 5, 7, 8, 9, 10, 11, 12, 14, 17, and/or 19 from the 5′ end of the first nucleotide sequence are 2′-fluoro nucleotides. In some embodiments, the nucleotide at position 3 from the 5′ end of the first nucleotide sequence is a 2′-fluoro nucleotide. In some embodiments, the nucleotide at position 5 from the 5′ end of the first nucleotide sequence is a 2′-fluoro nucleotide. In some embodiments, the nucleotide at position 7 from the 5′ end of the first nucleotide sequence is a 2′-fluoro nucleotide. In some embodiments, the nucleotide at position 8 from the 5′ end of the first nucleotide sequence is a 2′-fluoro nucleotide. In some embodiments, the nucleotide at position 9 from the 5′ end of the first nucleotide sequence is a 2′-fluoro nucleotide. In some embodiments, the nucleotide at position 10 from the 5′ end of the first nucleotide sequence is a 2′-fluoro nucleotide. In some embodiments, the nucleotide at position 11 from the 5′ end of the first nucleotide sequence is a 2′-fluoro nucleotide. In some embodiments, the nucleotide at position 12 from the 5′ end of the first nucleotide sequence is a 2′-fluoro nucleotide. In some embodiments, the nucleotide at position 14 from the 5′ end of the first nucleotide sequence is a 2′-fluoro nucleotide. In some embodiments, the nucleotide at position 17 from the 5′ end of the first nucleotide sequence is a 2′-fluoro nucleotide. In some embodiments, the nucleotide at position 19 from the 5′ end of the first nucleotide sequence is a 2′-fluoro nucleotide. In some embodiments, at least 1, 2, 3, 4, 5, 6, or 7 nucleotides at position 3, 5, 7, 8, 9, 10, 11, 12, and/or 17 from the 5′ end of the first nucleotide sequence is a 2′-fluoro nucleotide. In some embodiments, the nucleotide at position 3, 7, 8, 9, 12, and/or 17 from the 5′ end of the first nucleotide sequence is a 2′-fluoro nucleotide. In some embodiments, the nucleotide at position 3, 7, 8, and/or 17 from the 5′ end of the first nucleotide sequence is a 2′-fluoro nucleotide. In some embodiments, the nucleotide at position 3, 7, 8, 9, 12, and/or 17 from the 5′ end of the first nucleotide sequence is a 2′-fluoro nucleotide. In some embodiments, the nucleotide at position 5, 7, 8, and/or 9 from the 5′ end of the first nucleotide sequence is a 2′-fluoro nucleotide. In some embodiments, the nucleotide at position 5, 9, 10, 11, 12, and/or 19 from the 5′ end of the first nucleotide sequence is a 2′-fluoro nucleotide. In some embodiments, the nucleotide at position 5, 9, 10, 11, 14, and/or 19 from the 5′ end of the first nucleotide sequence is a 2′-fluoro nucleotide. In some embodiments, the nucleotide at position 5, 9, 10, and/or 11 from the 5′ end of the first nucleotide sequence is a 2′-fluoro nucleotide. In some embodiments, the 2′-fluoro nucleotide is a 2′-fluoro nucleotide mimic.

[0280] In some embodiments, the 2′-fluoro or 2′-O-methyl nucleotide mimic is a nucleotide mimic of Formula (V):

[chemical structure]

wherein Rₓ is independently a nucleobase, aryl, heteroaryl, or H, Q¹ and Q² are independently S or O, R⁵ is independently —OCD₃, —F, or —OCH₃, and R⁶ and R⁷ are independently H, D, or CD₃. In some embodiments, the nucleobase is selected from thymine, cytosine, guanine, adenine, uracil, and an analogue or derivative thereof.

[0281] In some embodiments, the 2′-fluoro or 2′-O-methyl nucleotide mimic is a nucleotide mimic of Formula (16)-Formula (20):

[chemical structure]

[0282] wherein Rₓ is independently a nucleobase and R² is F or —OCH₃. In some embodiments, the nucleobase is selected from thymine, cytosine, guanine, adenine, uracil, and an analogue or derivative thereof.

[0283] In some embodiments, the sense strand may comprise at least 1, at least 2, at least 3, at least 4, or at least 5 or more modified nucleotide(s) having the following chemical structure:

[chemical structure]

wherein B and Rₓ is a nucleobase, aryl, heteroaryl, or H. In some embodiments, the nucleobase is selected from thymine, cytosine, guanine, adenine, uracil, and an analogue or derivative thereof.

[0284] In some embodiments, the sense strand may comprise at least 1, at least 2, at least 3, at least 4, or at least 5 or more modified nucleotide(s) having the following chemical structure:

[chemical structure]

wherein B and R_{y} is a nucleobase. In some embodiments, the nucleobase is selected from thymine, cytosine, guanine, adenine, uracil, and an analogue or derivative thereof.

[0285] In some embodiments, the first nucleotide sequence comprises, consists of, or consists essentially of ribonucleic acids (RNAs). In some embodiments, the first nucleotide sequence comprises, consists of, or consists essentially of modified RNAs. In some embodiments, the modified RNAs are selected from a 2′-O-methyl RNA and 2′-fluoro RNA. In some embodiments, 15, 16, 17, 18, 19, 20, 21, 22, or 23 modified nucleotides of the first nucleotide sequence are independently selected from 2′-O-methyl RNA and 2′-fluoro RNA.

[0286] In some embodiments, the sense strand may further comprise one or more internucleoside linkages independently selected from a phosphodiester (PO) internucleoside linkage, phosphorothioate (PS) internucleoside linkage, mesyl phosphoramidate internucleoside linkage (Ms), phosphorodithioate internucleoside linkage, and PS-mimic internucleoside linkage. In some embodiments, the PS-mimic internucleoside linkage is a sulfo internucleoside linkage.

[0287] In some embodiments, the sense strand may further comprise at least 1, 2, 3, 4, 5, 6,

[0288] 7, 8, 9, 10, 11, 12, 13, 14, or 15 or more phosphorothioate internucleoside linkages. In some embodiments, the sense strand comprises 20, 19, 18, 17, 16, 15, 14, 13, 12, 11, 10, 9, 8, 7, 6, 5, 4, or 3 or fewer phosphorothioate internucleoside linkages. In some embodiments, the sense strand comprises 2 to 10, 2 to 8, 2 to 6, 1 to 5, 1 to 4, 1 to 3, or 1 to 2 phosphorothioate internucleoside linkages. In some embodiments, the sense strand comprises 1 to 2 phosphorothioate internucleoside linkages. In some embodiments, the sense strand comprises 2 to 4 phosphorothioate internucleoside linkages. In some embodiments, at least one phosphorothioate internucleoside linkage is between the nucleotides at positions 1 and 2 from the 5′ end of the first nucleotide sequence. In some embodiments, at least one phosphorothioate internucleoside linkage is between the nucleotides at positions 2 and 3 from the 5′ end of the first nucleotide sequence. In some embodiments, the sense strand comprises two phosphorothioate internucleoside linkages between the nucleotides at positions 1 to 3 from the 5′ end of the first nucleotide sequence.

[0289] In some embodiments, the sense strand may further comprise at least 1, 2, 3, 4, 5, 6, 7, 8, 9, 10, 11, 12, 13, 14, or 15 or more mesyl phosphoramidate internucleoside linkages. In some embodiments, the sense strand comprises 20, 19, 18, 17, 16, 15, 14, 13, 12, 11, 10, 9, 8, 7, 6, 5, 4, or 3 or fewer mesyl phosphoramidate internucleoside linkages. In some embodiments, the sense strand comprises 2 to 10, 2 to 8, 2 to 6, 1 to 5, 1 to 4, 1 to 3, or 1 to 2 mesyl phosphoramidate internucleoside linkages. In some embodiments, the sense strand comprises 1 to 2 mesyl phosphoramidate internucleoside linkages. In some embodiments, the sense strand comprises 2 to 4 mesyl phosphoramidate internucleoside linkages.

[0290] In some embodiments, the sense strand may comprise any of the modified nucleotides disclosed in the sub-section titled “Modified Nucleotides” below. In some embodiments, the sense stand may comprise a 5′-stabilized end cap, and the 5′-stabilized end cap may be selected from those disclosed in the sub-section titled “5′-Stabilized End Cap” below.

[0291] In some embodiments, any of the sense strands disclosed herein further comprise a TT sequence adjacent to the first nucleotide sequence.

siNA Antisense Strand

[0292] Any of the siNA molecules described herein may comprise an antisense strand. The antisense strand may comprise a second nucleotide sequence. The second nucleotide sequence may be 15 to 30, 15 to 25, 15 to 23, 17 to 23, 19 to 23, or 19 to 21 nucleotides in length. In some embodiments, the second nucleotide sequence is 15, 16, 17, 18, 19, 20, 21, 22, 23, 24, 25, 26, 27, 28, 29, or 30 nucleotides in length. In some embodiments, the second nucleotide sequence is at least 19 nucleotides in length. In some embodiments, the second nucleotide sequence is at least 21 nucleotides in length.

[0293] In some embodiments, the antisense strand is the same length as the second nucleotide sequence. In some embodiments, the antisense strand is longer than the second nucleotide sequence. In some embodiments, the antisense strand may further comprise 1, 2, 3, 4, or 5 or more nucleotides than the second nucleotide sequence. In some embodiments, the antisense strand is the same length as the sense strand. In some embodiments, the antisense strand is longer than the sense strand. In some embodiments, the antisense strand may further comprise 1, 2, 3, 4, or 5 or more nucleotides than the sense strand. In some embodiments, the antisense strand may further comprise a deoxyribonucleic acid (DNA). In some embodiments, the DNA is thymine (T). In some embodiments, the antisense strand may further comprise a TT sequence. In some embodiments, the antisense strand may further comprise one or more modified nucleotides that are adjacent to the second nucleotide sequence. In some embodiments, the one or more modified nucleotides are independently selected from any of the modified nucleotides disclosed herein (e.g., 2′-fluoro nucleotide, 2′-O methyl nucleotide, 2′-fluoro nucleotide mimic, 2′-O methyl nucleotide mimic, or a nucleotide comprising a modified nucleobase).

[0294] In some embodiments, the second nucleotide sequence comprises 15, 16, 17, 18, 19, 20, 21, 22, 23, or more modified nucleotides independently selected from a 2′-O methyl nucleotide and a 2′-fluoro nucleotide. In some embodiments, 70%, 75%, 80%, 85%, 90%, 95% or 100% of the nucleotides in the second nucleotide sequence are modified nucleotides independently selected from a 2′-O methyl nucleotide and a 2′-fluoro nucleotide. In some embodiments, 100% of the nucleotides in the second nucleotide sequence are modified nucleotides independently selected from a 2′-O methyl nucleotide and a 2′-fluoro nucleotide.

[0295] In some embodiments, between about 15 to 30, 15 to 25, 15 to 24, 15 to 23, 15 to 22, 15 to 21, 17 to 30, 17 to 25, 17 to 24, 17 to 23, 17 to 22, 17 to 21, 18 to 30, 18 to 25, 18 to 24, 18 to 23, 18 to 22, 18 to 21, 19 to 30, 19 to 25, 19 to 24, 19 to 23, 19 to 22, 19 to 21, 20 to 25, 20 to 24, 20 to 23, 21 to 25, 21 to 24, or 21 to 23 modified nucleotides of the second nucleotide sequence are 2′-O methyl nucleotides. In some embodiments, between about 2 to 20 modified nucleotides of the second nucleotide sequence are 2′-O methyl nucleotides. In some embodiments, between about 5 to 25 modified nucleotides of the second nucleotide sequence are 2′-O methyl nucleotides. In some embodiments, between about 10 to 25 modified nucleotides of the second nucleotide sequence are 2′-O methyl nucleotides. In some embodiments, between about 12 to 25 modified nucleotides of the second nucleotide sequence are 2′-O methyl nucleotides. In some embodiments, at least 10, 11, 12, 13, 14, 15, 16, 17, 18, 19, 20, 21, or 22 modified nucleotides of the second nucleotide sequence are 2′-O methyl nucleotides. In some embodiments, the second nucleotide sequence comprises 16, 17, 18, 19, 20, 21, 22, 23, or more modified nucleotides independently selected from a 2′-O methyl nucleotide and a 2′-fluoro nucleotide. In some embodiments, at least about 12 modified nucleotides of the second nucleotide sequence are 2′-O methyl nucleotides. In some embodiments, at least about 13 modified nucleotides of the second nucleotide sequence are 2′-O methyl nucleotides. In some embodiments, at least about 14 modified nucleotides of the second nucleotide sequence are 2′-O methyl nucleotides. In some embodiments, at least about 15 modified nucleotides of the second nucleotide sequence are 2′-O methyl nucleotides. In some embodiments, at least about 16 modified nucleotides of the second nucleotide sequence are 2′-O methyl nucleotides. In some embodiments, at least about 17 modified nucleotides of the second nucleotide sequence are 2′-O methyl nucleotides. In some embodiments, at least about 18 modified nucleotides of the second nucleotide sequence are 2′-O methyl nucleotides. In some embodiments, at least about 19 modified nucleotides of the second nucleotide sequence are 2′-O methyl nucleotides. In some embodiments, less than or equal to 25, 24, 23, 22, 21, 20, 19, 18, 17, 16, 15, 14, 13, 12, 11, 10, 9, 8, 7, 6, 5, 4, 3, or 2 modified nucleotides of the second nucleotide sequence are 2′-O methyl nucleotides. In some embodiments, less than or equal to 21 modified nucleotides of the second nucleotide sequence are 2′-O methyl nucleotides. In some embodiments, less than or equal to 20 modified nucleotides of the second nucleotide sequence are 2′-O methyl nucleotides. In some embodiments, less than or equal to 19 modified nucleotides of the second nucleotide sequence are 2′-O methyl nucleotides. In some embodiments, less than or equal to 18 modified nucleotides of the second nucleotide sequence are 2′-O methyl nucleotides. In some embodiments, less than or equal to 17 modified nucleotides of the second nucleotide sequence are 2′-O methyl nucleotides. In some embodiments, less than or equal to 16 modified nucleotides of the second nucleotide sequence are 2′-O methyl nucleotides. In some embodiments, less than or equal to 15 modified nucleotides of the second nucleotide sequence are 2′-O methyl nucleotides. In some embodiments, less than or equal to 14 modified nucleotides of the second nucleotide sequence are 2′-O methyl nucleotides. In some embodiments, less than or equal to 13 modified nucleotides of the second nucleotide sequence are 2′-O methyl nucleotides. In some embodiments, at least one modified nucleotide of the second nucleotide sequence is a 2′-O methyl pyrimidine. In some embodiments, at least 5, 6, 7, 8, 9, or 10 modified nucleotides of the second nucleotide sequence are 2′-O methyl pyrimidines. In some embodiments, at least one modified nucleotide of the second nucleotide sequence is a 2′-O methyl purine. In some embodiments, at least 5, 6, 7, 8, 9, or 10 modified nucleotides of the second nucleotide sequence are 2′-O methyl purines. In some embodiments, the 2′-O methyl nucleotide is a 2′-O methyl nucleotide mimic.

[0296] In some embodiments, between 2 to 15 modified nucleotides of the second nucleotide sequence are 2′-fluoro nucleotides. In some embodiments, between 2 to 10 modified nucleotides of the second nucleotide sequence are 2′-fluoro nucleotides. In some embodiments, between 2 to 6 modified nucleotides of the second nucleotide sequence are 2′-fluoro nucleotides. In some embodiments, 1 to 6, 1 to 5, 1 to 4, or 1 to 3 modified nucleotides of the second nucleotide sequence are 2′-fluoro nucleotides. In some embodiments, at least 1, 2, 3, 4, 5, or 6 modified nucleotides of the second nucleotide sequence are 2′-fluoro nucleotides. In some embodiments, at least 2, 3, 4, 5, or 6 modified nucleotides of the second nucleotide sequence are 2′-fluoro nucleotides. In some embodiments, at least 1 modified nucleotide of the second nucleotide sequence is a 2′-fluoro nucleotide. In some embodiments, at least 2 modified nucleotides of the second nucleotide sequence are 2′-fluoro nucleotides. In some embodiments, at least 3 modified nucleotides of the second nucleotide sequence are 2′-fluoro nucleotides. In some embodiments, at least 4 modified nucleotides of the second nucleotide sequence are 2′-fluoro nucleotides. In some embodiments, at least 5 modified nucleotides of the second nucleotide sequence are 2′-fluoro nucleotides. In some embodiments, 10, 9, 8, 7, 6, 5, 4, 3 or fewer modified nucleotides of the second nucleotide sequence are 2′-fluoro nucleotides. In some embodiments, less than or equal to 10, 9, 8, 7, 6, 5, 4, 3, or 2 modified nucleotides of the second nucleotide sequence are 2′-fluoro nucleotides. In some embodiments, 10 or fewer modified nucleotides of the second nucleotide sequence are 2′-fluoro nucleotides. In some embodiments, 7 or fewer modified nucleotides of the second nucleotide sequence are 2′-fluoro nucleotides. In some embodiments, 6 or fewer modified nucleotides of the second nucleotide sequence are 2′-fluoro nucleotides. In some embodiments, 5 or fewer modified nucleotides of the second nucleotide sequence are 2′-fluoro nucleotides. In some embodiments, 4 or fewer modified nucleotides of the second nucleotide sequence are 2′-fluoro nucleotides. In some embodiments, 3 or fewer modified nucleotides of the second nucleotide sequence are 2′-fluoro nucleotides. In some embodiments, 2 or fewer modified nucleotides of the second nucleotide sequence are 2′-fluoro nucleotides. In some embodiments, at least one modified nucleotide of the second nucleotide sequence is a 2′-fluoro pyrimidine. In some embodiments, 1, 2, 3, 4, 5, or 6 modified nucleotides of the second nucleotide sequence are 2′-fluoro pyrimidines. In some embodiments, at least one modified nucleotide of the second nucleotide sequence is a 2′-fluoro purine. In some embodiments, 1, 2, 3, 4, 5, or 6 modified nucleotides of the second nucleotide sequence are 2′-fluoro purines. In some embodiments, the 2′-fluoro nucleotide is a 2′-fluoro nucleotide mimic.

[0297] In some embodiments, the 2′-fluoro nucleotide or 2′-O-methyl nucleotide is a 2′-fluoro or 2′-O-methyl nucleotide mimic. In some embodiments, the 2′-fluoro or 2′-O-methyl nucleotide mimic is a nucleotide mimic of Formula (V):

[chemical structure]

wherein Rₓ is independently a nucleobase, aryl, heteroaryl, or H, Q¹ and Q² are independently S or O, R⁵ is independently —OCD₃, —F, or —OCH₃, and R⁶ and R⁷ are independently H, D, or CD₃. In some embodiments, the nucleobase is selected from thymine, cytosine, guanine, adenine, uracil, and an analogue or derivative thereof.

[0298] In some embodiments, the 2′-fluoro or 2′-O-methyl nucleotide mimic is a nucleotide mimic of Formula (16)-Formula (20):

[chemical structure]

[0299] wherein Rₓ is a nucleobase and R² is independently F or —OCH₃. In some embodiments, the nucleobase is selected from thymine, cytosine, guanine, adenine, uracil, and an analogue or derivative thereof.

[0300] In some embodiments, the antisense strand may comprise at least 1, at least 2, at least 3, at least 4, or at least 5 or more modified nucleotide(s) having the following chemical structure:

[chemical structure]

wherein B and Rx is a nucleobase, aryl, heteroaryl, or H. In some embodiments, the nucleobase is selected from thymine, cytosine, guanine, adenine, uracil, and an analogue or derivative thereof.

[0301] In some embodiments, the antisense strand may comprise at least 1, at least 2, at least 3, at least 4, or at least 5 or more modified nucleotide(s) having the following chemical structure:

[chemical structure]

wherein B and R_{y} is a nucleobase. In some embodiments, the nucleobase is selected from thymine, cytosine, guanine, adenine, uracil, and an analogue or derivative thereof.

[0302] In some embodiments, at least 1, 2, 3, 4, 5, 6, 7, 8, or 9 nucleotides at position 2, 5, 6, 8, 10, 14, 16, 17, and/or 18 from the 5′ end of the second nucleotide sequence is a 2′-fluoro nucleotide. In some embodiments, the nucleotide at position 2, 5, 6, 8, 10, 14, 16, 17, and/or 18 from the 5′ end of the second nucleotide sequence is a 2′-fluoro nucleotide. In some embodiments, at least two nucleotides at positions 2, 5, 6, 8, 10, 14, 16, 17, and/or 18 from the 5′ end of the second nucleotide sequence are 2′-fluoro nucleotides. In some embodiments, at least three nucleotides at positions 2, 5, 6, 8, 10, 14, 16, 17, and/or 18 from the 5′ end of the second nucleotide sequence are 2′-fluoro nucleotides. In some embodiments, at least four nucleotides at positions 2, 5, 6, 8, 10, 14, 16, 17, and/or 18 from the 5′ end of the second nucleotide sequence are 2′-fluoro nucleotides. In some embodiments, at least five nucleotides at positions 2, 5, 6, 8, 10, 14, 16, 17, and/or 18 from the 5′ end of the second nucleotide sequence are 2′-fluoro nucleotides. In some embodiments, the nucleotides at positions 2 and/or 14 from the 5′ end of the second nucleotide sequence are 2′-fluoro nucleotides. In some embodiments, the nucleotides at positions 2, 6, and/or 16 from the 5′ end of the second nucleotide sequence are 2′-fluoro nucleotides. In some embodiments, the nucleotides at positions 2, 6, 14, and/or 16 from the 5′ end of the second nucleotide sequence are 2′-fluoro nucleotides. In some embodiments, the nucleotides at positions 2, 6, 10, 14, and/or 18 from the 5′ end of the second nucleotide sequence are 2′-fluoro nucleotides. In some embodiments, the nucleotides at positions 2, 5, 8, 14, and/or 17 from the 5′ end of the second nucleotide sequence are 2′-fluoro nucleotides. In some embodiments, the nucleotide at position 2 from the 5′ end of the second nucleotide sequence is a 2′-fluoro nucleotide. In some embodiments, the nucleotide at position 5 from the 5′ end of the second nucleotide sequence is a 2′-fluoro nucleotide. In some embodiments, the nucleotide at position 6 from the 5′ end of the second nucleotide sequence is a 2′-fluoro nucleotide. In some embodiments, the nucleotide at position 8 from the 5′ end of the second nucleotide sequence is a 2′-fluoro nucleotide. In some embodiments, the nucleotide at position 10 from the 5′ end of the second nucleotide sequence is a 2′-fluoro nucleotide. In some embodiments, the nucleotide at position 14 from the 5′ end of the second nucleotide sequence is a 2′-fluoro nucleotide. In some embodiments, the nucleotide at position 16 from the 5′ end of the second nucleotide sequence is a 2′-fluoro nucleotide. In some embodiments, the nucleotide at position 17 from the 5′ end of the second nucleotide sequence is a 2′-fluoro nucleotide. In some embodiments, the nucleotide at position 18 from the 5′ end of the second nucleotide sequence is a 2′-fluoro nucleotide. In some embodiments, the 2′-fluoro nucleotide is a 2′-fluoro nucleotide mimic.

[0303] In some embodiments, the nucleotides in the second nucleotide sequence are arranged in an alternating 1:3 modification pattern, wherein 1 nucleotide is a 2′-fluoro nucleotide and 3 nucleotides are 2′-O methyl nucleotides, and wherein the alternating 1:3 modification pattern occurs at least 2 times. In some embodiments, the alternating 1:3 modification pattern occurs 2-5 times. In some embodiments, at least two of the alternating 1:3 modification pattern occur consecutively. In some embodiments, at least two of the alternating 1:3 modification pattern occurs nonconsecutively. In some embodiments, at least 1, 2, 3, 4, or 5 alternating 1:3 modification pattern begins at nucleotide position 2, 6, 10, 14, and/or 18 from the 5′ end of the antisense strand. In some embodiments, at least one alternating 1:3 modification pattern begins at nucleotide position 2 from the 5′ end of the antisense strand. In some embodiments, wherein at least one alternating 1:3 modification pattern begins at nucleotide position 6 from the 5′ end of the antisense strand. In some embodiments, at least one alternating 1:3 modification pattern begins at nucleotide position 10 from the 5′ end of the antisense strand. In some embodiments, at least one alternating 1:3 modification pattern begins at nucleotide position 14 from the 5′ end of the antisense strand. In some embodiments, at least one alternating 1:3 modification pattern begins at nucleotide position 18 from the 5′ end of the antisense strand. In some embodiments, the 2′-fluoro nucleotide is a 2′-fluoro nucleotide mimic.

[0304] In some embodiments, the nucleotides in the second nucleotide sequence are arranged in an alternating 1:2 modification pattern, wherein 1 nucleotide is a 2′-fluoro nucleotide and 2 nucleotides are 2′-O methyl nucleotides, and wherein the alternating 1:2 modification pattern occurs at least 2 times. In some embodiments, the alternating 1:2 modification pattern occurs 2-5 times. In some embodiments, at least two of the alternating 1:2 modification pattern occurs consecutively. In some embodiments, at least two of the alternating 1:2 modification pattern occurs nonconsecutively. In some embodiments, at least 1, 2, 3, 4, or 5 alternating 1:2 modification pattern begins at nucleotide position 2, 5, 8, 14, and/or 17 from the 5′ end of the antisense strand. In some embodiments, at least one alternating 1:2 modification pattern begins at nucleotide position 2 from the 5′ end of the antisense strand. In some embodiments, at least one alternating 1:2 modification pattern begins at nucleotide position 5 from the 5′ end of the antisense strand. In some embodiments, at least one alternating 1:2 modification pattern begins at nucleotide position 8 from the 5′ end of the antisense strand. In some embodiments, at least one alternating 1:2 modification pattern begins at nucleotide position 14 from the 5′ end of the antisense strand. In some embodiments, at least one alternating 1:2 modification pattern begins at nucleotide position 17 from the 5′ end of the antisense strand. In some embodiments, the 2′-fluoro nucleotide is a 2′-fluoro nucleotide mimic.

[0305] In some embodiments, the second nucleotide sequence comprises, consists of, or consists essentially of ribonucleic acids (RNAs). In some embodiments, the second nucleotide sequence comprises, consists of, or consists essentially of modified RNAs. In some embodiments, the modified RNAs are selected from a 2′-O methyl RNA and 2′-fluoro RNA. In some embodiments, 15, 16, 17, 18, 19, 20, 21, 22, or 23 modified nucleotides of the second nucleotide sequence are independently selected from 2′-O methyl RNA and 2′-fluoro RNA. In some embodiments, the 2′-fluoro nucleotide is a 2′-fluoro nucleotide mimic.

[0306] In some embodiments, the sense strand may further comprise one or more internucleoside linkages independently selected from a phosphodiester (PO) internucleoside linkage, phosphorothioate (PS) internucleoside linkage, phosphorodithioate internucleoside linkage, and PS-mimic internucleoside linkage. In some embodiments, the PS-mimic internucleoside linkage is a sulfo internucleoside linkage.

[0307] In some embodiments, the antisense strand may further comprise at least 1, 2, 3, 4, 5, 6, 7, 8, 9, 10, 11, 12, 13, 14, or 15 or more phosphorothioate internucleoside linkages. In some embodiments, the antisense strand comprises 20, 19, 18, 17, 16, 15, 14, 13, 12, 11, 10, 9, 8, 7, 6, 5, 4, or 3 or fewer phosphorothioate internucleoside linkages. In some embodiments, the antisense strand comprises 2 to 10, 2 to 8, 2 to 6, 1 to 5, 1 to 4, 1 to 3, or 1 to 2 phosphorothioate internucleoside linkages. In some embodiments, the antisense strand comprises 2 to 10, 2 to 8, 2 to 6, 1 to 5, 1 to 4, 1 to 3, or 1 to 2 phosphorothioate internucleoside linkages. In some embodiments, the antisense strand comprises 2 to 8 phosphorothioate internucleoside linkages. In some embodiments, the antisense strand comprises 3 to 8 phosphorothioate internucleoside linkages. In some embodiments, the antisense strand comprises 4 to 8 phosphorothioate internucleoside linkages. In some embodiments, at least one phosphorothioate internucleoside linkage is between the nucleotides at positions 1 and 2 from the 5′ end of the second nucleotide sequence. In some embodiments, at least one phosphorothioate internucleoside linkage is between the nucleotides at positions 2 and 3 from the 5′ end of the second nucleotide sequence. In some embodiments, at least one phosphorothioate internucleoside linkage is between the nucleotides at positions 1 and 2 from the 3′ end of the second nucleotide sequence. In some embodiments, at least one phosphorothioate internucleoside linkage is between the nucleotides at positions 2 and 3 from the 3′ end of the second nucleotide sequence. In some embodiments, the antisense strand comprises two phosphorothioate internucleoside linkages between the nucleotides at positions 1 to 3 from the 5′ end of the first nucleotide sequence. In some embodiments, the antisense strand comprises two phosphorothioate internucleoside linkages between the nucleotides at positions 1 to 3 from the 3′ end of the first nucleotide sequence. In some embodiments, the antisense strand comprises (a) two phosphorothioate internucleoside linkages between the nucleotides at positions 1 to 3 from the 5′ end of the first nucleotide sequence; and (b) two phosphorothioate internucleoside linkages between the nucleotides at positions 1 to 3 from the 3′ end of the first nucleotide sequence.

[0308] In some embodiments, the antisense strand may further comprise at least 1, 2, 3, 4, 5, 6, 7, 8, 9, 10, 11, 12, 13, 14, or 15 or more mesyl phosphoramidate internucleoside linkages. In some embodiments, the antisense strand comprises 20, 19, 18, 17, 16, 15, 14, 13, 12, 11, 10, 9, 8, 7, 6, 5, 4, or 3 or fewer mesyl phosphoramidate internucleoside linkages. In some embodiments, the antisense strand comprises 2 to 10, 2 to 8, 2 to 6, 1 to 5, 1 to 4, 1 to 3, or 1 to 2 mesyl phosphoramidate internucleoside linkages. In some embodiments, the antisense strand comprises 2 to 10, 2 to 8, 2 to 6, 1 to 5, 1 to 4, 1 to 3, or 1 to 2 mesyl phosphoramidate internucleoside linkages. In some embodiments, the antisense strand comprises 2 to 8 mesyl phosphoramidate internucleoside linkages. In some embodiments, the antisense strand comprises 3 to 8 mesyl phosphoramidate internucleoside linkages. In some embodiments, the antisense strand comprises 4 to 8 mesyl phosphoramidate internucleoside linkages.

[0309] In some embodiments, at least one end of the ds-siNA is a blunt end. In some embodiments, at least one end of the ds-siNA comprises an overhang, wherein the overhang comprises at least one nucleotide. In some embodiments, both ends of the ds-siNA comprise an overhang, wherein the overhang comprises at least one nucleotide. In some embodiments, the overhang comprises 1 to 5 nucleotides, 1 to 4 nucleotides, 1 to 3 nucleotides, or 1 to 2 nucleotides. In some embodiments, the overhang consists of 1 to 2 nucleotides.

[0310] In some embodiments, the sense strand may comprise any of the modified nucleotides disclosed in the sub-section titled “Modified Nucleotides” below. In some embodiments, the sense stand may comprise a 5′-stabilized end cap, and the 5′-stabilized end cap may be selected from those disclosed in the sub-section titled “5′-Stabilized End Cap” below.

[0311] In some embodiments, any of the antisense strands disclosed herein further comprise TT sequence adjacent to the second nucleotide sequence.

### Modified Nucleotides

[0312] The siNA molecules disclosed herein comprise one or more modified nucleotides. In some embodiments, the sense strands disclosed herein comprise one or more modified nucleotides. In some embodiments, any of the first nucleotide sequences disclosed herein comprise one or more modified nucleotides. In some embodiments, the antisense strands disclosed herein comprise one or more modified nucleotides. In some embodiments, any of the second nucleotide sequences disclosed herein comprise one or more modified nucleotides. In some embodiments, the one or more modified nucleotides is adjacent to the first nucleotide sequence. In some embodiments, at least one modified nucleotide is adjacent to the 5′ end of the first nucleotide sequence. In some embodiments, at least one modified nucleotide is adjacent to the 3′ end of the first nucleotide sequence. In some embodiments, at least one modified nucleotide is adjacent to the 5′ end of the first nucleotide sequence and at least one modified nucleotide is adjacent to the 3′ end of the first nucleotide sequence. In some embodiments, the one or more modified nucleotides is adjacent to the second nucleotide sequence. In some embodiments, at least one modified nucleotide is adjacent to the 5′ end of the second nucleotide sequence. In some embodiments, at least one modified nucleotide is adjacent to the 3′ end of the second nucleotide sequence. In some embodiments, at least one modified nucleotide is adjacent to the 5′ end of the second nucleotide sequence and at least one modified nucleotide is adjacent to the 3′ end of the second nucleotide sequence. In some embodiments, a 2′-O methyl nucleotide in any of sense strands or first nucleotide sequences disclosed herein is replaced with a modified nucleotide. In some embodiments, a 2′-O methyl nucleotide in any of antisense strands or second nucleotide sequences disclosed herein is replaced with a modified nucleotide.

[0313] In some embodiments, any of the siNA molecules, siNAs, sense strands, first nucleotide sequences, antisense strands, and second nucleotide sequences disclosed herein comprise 1, 2, 3, 4, 5, 6, 7, 8, 9, 10, 11, 12, 13, 14, 15, 16, 17, 18, 19, 20, 21, 22, 23, 24, 25, 26, 27, 28, 29, or 30 or more modified nucleotides. In some embodiments, 1%, 2%, 3%, 4%, 5%, 10%, 15%, 20%, 25%, 30%, 35%, 40%, 45%, 50%, 55%, 60%, 70%, 75%, 80%, 85%, 86%, 87%, 88%, 90%, 91%, 92%, 93%, 94%, 95%, 96%, 97%, 98%, 99% or 100% of the nucleotides in the siNA molecule, siNA, sense strand, first nucleotide sequence, antisense strand, or second nucleotide sequence are modified nucleotides.

[0314] In some embodiments, a modified nucleotide is selected from the group consisting of 2′-fluoro nucleotide, 2′-O methyl nucleotide, 2′-fluoro nucleotide mimic, 2′-O methyl nucleotide mimic, a locked nucleic acid, an unlocked nucleic acid, and a nucleotide comprising a modified nucleobase. In some embodiments, the unlocked nucleic acid is a 2′,3′-unlocked nucleic acid. In some embodiments, the unlocked nucleic acid is a 3′,4′-unlocked nucleic acid (e.g., mun34) in which the furanose ring lacks a bond between the 3′ and 4; carbons.

[0315] In some aspects, the siNA of the present disclosure will comprise at least one modified nucleotide selected from:

[chemical structure]

(wherein Rx is a nucleobase, aryl, heteroaryl, or H),

[chemical structure]

wherein B and R_{y} is a nucleobase, and

[chemical structure]

or combinations thereof. In some embodiments, the siNA may comprise at least 2, at least 3, at least 4, or at least 5 or more of these modified nucleotides. In some embodiments, the sense strand may comprise at least 1, at least 2, at least 3, at least 4, or at least 5 or more of

[chemical structure]

(wherein Rx is a nucleobase, aryl, heteroaryl, or H),

[chemical structure]

wherein B and R_{y} is a nucleobase, and

[chemical structure]

or combinations thereof. In some embodiments, the antisense strand may comprise at least 1, at least 2, at least 3, at least 4, or at least 5 or more of

[chemical structure]

(wherein Rx is a nucleobase, aryl, heteroaryl, or H),

[chemical structure]

wherein B and R_{y} is a nucleobase, and

[chemical structure]

or combinations thereof. In some embodiments, both the sense strand and the antisense strand may each independently comprise at least 1, at least 2, at least 3, at least 4, or at least 5 or more of

[chemical structure]

(wherein Rₓ is a nucleobase, aryl, heteroaryl, or H),

[chemical structure]

wherein B and R_{y} is a nucleobase, and

[chemical structure]

or combinations thereof. In some embodiments, the nucleobase is selected from thymine, cytosine, guanine, adenine, uracil, and an analogue or derivative thereof.

[0316] In some embodiments, any of the siNAs disclosed herein may additionally comprise other modified nucleotides, such as 2′-fluoro or 2′-O-methyl nucleotide mimics. For example, the disclosed siNA may comprise at least 1, 2, 3, 4, 5, 6, 7, 8, 9, or 10 or more 2′-fluoro or 2′-O-methyl nucleotide mimics. In some embodiments, any of the sense strands disclosed herein comprise at least 1, 2, 3, 4, 5, 6, 7, 8, 9, or 10 or more 2′-fluoro or 2′-O-methyl nucleotide mimics. In some embodiments, any of the first nucleotide sequences disclosed herein comprise at least 1, 2, 3, 4, 5, 6, 7, 8, 9, or 10 or more 2′-fluoro or 2′-O-methyl nucleotide mimics. In some embodiments, any of the antisense strand disclosed herein comprise at least 1, 2, 3, 4, 5, 6, 7, 8, 9, or 10 or more 2′-fluoro or 2′-O-methyl nucleotide mimics. In some embodiments, any of the second nucleotide sequences disclosed herein comprise at least 1, 2, 3, 4, 5, 6, 7, 8, 9, or 10 or more 2′-fluoro or 2′-O-methyl nucleotide mimics. In some embodiments, the 2′-fluoro or 2′-O-methyl nucleotide mimic is a nucleotide mimic of Formula (16)-Formula (20):

[chemical structure]

[0317] wherein Rₓ is a nucleobase and R² is independently F or —OCH₃. In some embodiments, the nucleobase is selected from thymine, cytosine, guanine, adenine, uracil, and an analogue or derivative thereof.

[0318] In some embodiments, the siNA molecules disclosed herein comprise at least one 2′-fluoro nucleotide, at least one 2′-O-methyl nucleotide, and at least one 2′-fluoro or 2′-O-methyl nucleotide mimic. In some embodiments, the at least one 2′-fluoro or 2′-O-methyl nucleotide mimic is adjacent to the first nucleotide sequence. In some embodiments, the at least one 2′-fluoro or 2′-O-methyl nucleotide mimic is adjacent to the 5′ end of first nucleotide sequence. In some embodiments, the at least one 2′-fluoro or 2′-O-methyl nucleotide mimic is adjacent to the 3′ end of first nucleotide sequence. In some embodiments, the at least one 2′-fluoro or 2′-O-methyl nucleotide mimic is adjacent to the second nucleotide sequence. In some embodiments, the at least one 2′-fluoro or 2′-O-methyl nucleotide mimic is adjacent to the 5′ end of second nucleotide sequence. In some embodiments, the at least one 2′-fluoro or 2′-O-methyl nucleotide mimic is adjacent to the 3′ end of second nucleotide sequence. In some embodiments, the first nucleotide sequence does not comprise a 2′-fluoro nucleotide mimic. In some embodiments, the first nucleotide sequence does not comprise a 2′-O-methyl nucleotide mimic. In some embodiments, the second nucleotide sequence does not comprise a 2′-fluoro nucleotide mimic. In some embodiments, the second nucleotide sequence does not comprise a 2′-O-methyl nucleotide mimic.

[0319] In some embodiments, any of the siNAs, sense strands, first nucleotide sequences, antisense strands, or second nucleotide sequences disclosed herein comprise at least one modified nucleotide that is

[chemical structure]

wherein Rx is a nucleobase, aryl, heteroaryl, or H;

[chemical structure]

wherein R_{y} is a nucleobase, or

[chemical structure]

wherein B is a nucleobase.

### Phosphorylation Blocker

[0320] Further disclosed herein are siNA molecules comprising a phosphorylation blocker. In some embodiments, a 2′-O-methyl nucleotide in any of sense strands or first nucleotide sequences disclosed herein is replaced with a nucleotide containing a phosphorylation blocker. In some embodiments, a 2′-O-methyl nucleotide in any of antisense strands or second nucleotide sequences disclosed herein is replaced with a nucleotide containing a phosphorylation blocker. In some embodiments, a 2′-O-methyl nucleotide in any of sense strands or first nucleotide sequences disclosed herein is further modified to contain a phosphorylation blocker. In some embodiments, a 2′-O-methyl nucleotide in any of antisense strands or second nucleotide sequences disclosed herein is further modified to contain a phosphorylation blocker.

[0321] In some embodiments, any of the siNA molecules disclosed herein comprise a phosphorylation blocker of Formula (IV):

[chemical structure]

wherein R_{y} is a nucleobase, R⁴ is —O—R³⁰ or —NR³¹R³², R³⁰ is C₁-C₈ substituted or unsubstituted alkyl; and R³¹ and R³² together with the nitrogen to which they are attached form a substituted or unsubstituted heterocyclic ring. In some embodiments, the nucleobase is selected from thymine, cytosine, guanine, adenine, uracil, and an analogue or derivative thereof.

[0322] In some embodiments, any of the siNA molecules disclosed herein comprise a phosphorylation blocker of Formula (IV):

[chemical structure]

wherein R_{y} is a nucleobase, and R⁴ is —OCH₃ or —N(CH₂CH₂)₂O. In some embodiments, the nucleobase is selected from thymine, cytosine, guanine, adenine, uracil, and an analogue or derivative thereof.

[0323] In some embodiments, a siNA molecule comprises (a) a phosphorylation blocker of Formula (IV):

[chemical structure]

wherein R_{y} is a nucleobase, R⁴ is —O—R³⁰ or —NR³¹R³², R³⁰ is C₁-C₈ substituted or unsubstituted alkyl; and R³¹ and R³² together with the nitrogen to which they are attached form a substituted or unsubstituted heterocyclic ring; and (b) a short interfering nucleic acid (siNA), wherein the phosphorylation blocker is conjugated to the siNA. In some embodiments, the nucleobase is selected from thymine, cytosine, guanine, adenine, uracil, and an analogue or derivative thereof.

[0324] In some embodiments, a siNA molecule comprises (a) a phosphorylation blocker of Formula (IV):

[chemical structure]

wherein R_{y} is a nucleobase, and R⁴ is —OCH₃ or —N(CH₂CH₂)₂O; and (b) a short interfering nucleic acid (siNA), wherein the phosphorylation blocker is conjugated to the siNA.

[0325] In some embodiments, the phosphorylation blocker is attached to the 3′ end of the sense strand or first nucleotide sequence. In some embodiments, the phosphorylation blocker is attached to the 3′ end of the sense strand or first nucleotide sequence via 1, 2, 3, 4, or 5 or more linkers. In some embodiments, the phosphorylation blocker is attached to the 5′ end of the sense strand or first nucleotide sequence. In some embodiments, the phosphorylation blocker is attached to the 5′ end of the sense strand or first nucleotide sequence via 1, 2, 3, 4, or 5 or more linkers. In some embodiments, the phosphorylation blocker is attached to the 3′ end of the antisense strand or second nucleotide sequence. In some embodiments, the phosphorylation blocker is attached to the 3′ end of the antisense strand or second nucleotide sequence via 1, 2, 3, 4, or 5 or more linkers. In some embodiments, the phosphorylation blocker is attached to the 5′ end of the antisense strand or second nucleotide sequence. In some embodiments, the phosphorylation blocker is attached to the 5′ end of the antisense strand or second nucleotide sequence via 1, 2, 3, 4, or 5 or more linkers. In some embodiments, the one or more linkers are independently selected from the group consisting of a phosphodiester linker, phosphorothioate linker, mesyl phosphoramidate linker and phosphorodithioate linker.

### Conjugated Moiety

[0326] Further disclosed herein are siNA molecules comprising a conjugated moiety. In some embodiments, the conjugated moiety is selected from galactosamine, peptides, proteins, sterols, lipids, phospholipids, biotin, phenoxazines, active drug substance, cholesterols, phenanthridine, anthraquinone, acridine, fluoresceins, rhodamines, coumarins, and dyes. In some embodiments, the conjugated moiety is attached to the 3′ end of the sense strand or first nucleotide sequence. In some embodiments, the conjugated moiety is attached to the 3′ end of the sense strand or first nucleotide sequence via 1, 2, 3, 4, or 5 or more linkers. In some embodiments, the conjugated moiety is attached to the 5′ end of the sense strand or first nucleotide sequence. In some embodiments, the conjugated moiety is attached to the 5′ end of the sense strand or first nucleotide sequence via 1, 2, 3, 4, or 5 or more linkers. In some embodiments, the conjugated moiety is attached to the 3′ end of the antisense strand or second nucleotide sequence. In some embodiments, the conjugated moiety is attached to the 3′ end of the antisense strand or second nucleotide sequence via 1, 2, 3, 4, or 5 or more linkers. In some embodiments, the conjugated moiety is attached to the 5′ end of the antisense strand or second nucleotide sequence. In some embodiments, the conjugated moiety is attached to the 5′ end of the antisense strand or second nucleotide sequence via 1, 2, 3, 4, or 5 or more linkers. In some embodiments, the one or more linkers are independently selected from the group consisting of a phosphodiester linker, phosphorothioate linker, phosphorodithioate linker, and mesyl phosphoramidate linker.

[0327] In some embodiments, the conjugated moiety is galactosamine. In some embodiments, any of the siNAs disclosed herein are attached to a conjugated moiety that is galactosamine. In some embodiments, the galactosamine is N-acetylgalactosamine (GalNAc). In some embodiments, any of the siNA molecules disclosed herein comprise GalNAc. In some embodiments, the GalNAc is of Formula (VI):

[chemical structure]

[0328] wherein m is 1, 2, 3, 4, or 5; each n is independently 1 or 2; p is 0 or 1; each R is independently H or a first protecting group; each Y is independently selected from —O—P(═O)(SH)—, —O—P(═O)(O)—, —O—P(═O)(OH)—, —O—P(S)S—, and —O—; Z is H or a second protecting group; either L is a linker or L and Y in combination are a linker; and A is H, OH, a third protecting group, an activated group, or an oligonucleotide. In some embodiments, the first protecting group is acetyl. In some embodiments, the second protecting group is trimethoxytrityl (TMT). In some embodiments, the activated group is a phosphoramidite group. In some embodiments, the phosphoramidite group is a cyanoethoxy N,N-diisopropylphosphoramidite group. In some embodiments, the linker is a C6-NH₂ group. In some embodiments, A is a short interfering nucleic acid (siNA) or siNA molecule. In some embodiments, m is 3. In some embodiments, R is H, Z is H, and n is 1. In some embodiments, R is H, Z is H, and n is 2.

[0329] In some embodiments, the GalNAc is of Formula (VII):

[chemical structure]

[0330] wherein R^{z} is OH or SH; and each n is independently 1 or 2.

[0331] In some embodiments, the galactosamine is attached to the 3′ end of the sense strand or first nucleotide sequence. In some embodiments, the galactosamine is attached to the 3′ end of the sense strand or first nucleotide sequence via 1, 2, 3, 4, or 5 or more linkers. In some embodiments, the galactosamine is attached to the 5′ end of the sense strand or first nucleotide sequence. In some embodiments, the galactosamine is attached to the 5′ end of the sense strand or first nucleotide sequence via 1, 2, 3, 4, or 5 or more linkers. In some embodiments, the galactosamine is attached to the 3′ end of the antisense strand or second nucleotide sequence. In some embodiments, the galactosamine is attached to the 3′ end of the antisense strand or second nucleotide sequence via 1, 2, 3, 4, or 5 or more linkers. In some embodiments, the galactosamine is attached to the 5′ end of the antisense strand or second nucleotide sequence. In some embodiments, the galactosamine is attached to the 5′ end of the antisense strand or second nucleotide sequence via 1, 2, 3, 4, or 5 or more linkers. In some embodiments, the one or more linkers are independently selected from the group consisting of a phosphodiester (p or po) linker, phosphorothioate (ps) linker, mesyl phosphoramidate linker (Ms), phosphoramidite (HEG) linker, triethylene glycol (TEG) linker, and/or phosphorodithioate linker. In some embodiments, the one or more linkers are independently selected from the group consisting of p-(PS)2, (PS)2-p-TEG-p, (PS)2-p-HEG-p, and (PS)2-p-(HEG-p)2.

[0332] In some embodiments, the conjugated moiety is a lipid moiety. In some embodiments, any of the siNAs disclosed herein are attached to a conjugated moiety that is a lipid moiety. Examples of lipid moieties include, but are not limited to, a cholesterol moiety, a thioether, e.g., hexyl-S-tritylthiol, a thiocholesterol, an aliphatic chain, e.g., dodecandiol or undecyl residues a phospholipid, e.g., di-hexadecyl-rac-glycerol or triethylammonium 1-di-O-hexadecyl-rac-glycero-S—H-phosphonate, a polyamine or a polyethylene glycol chain, adamantane acetic acid, a palmityl moiety, or an octadecylamine or hexylamino-carbonyl-oxycholesterol moiety.

[0333] In some embodiments, the conjugated moiety is an active drug substance. In some embodiments, any of the siNAs disclosed herein are attached to a conjugated moiety that is an active drug substance. Examples of active drug substances include, but are not limited to, aspirin, warfarin, phenylbutazone, ibuprofen, suprofen, fenbufen, ketoprofen, (5)-(+)-pranoprofen, carprofen, dansylsarcosine, 2,3,5-triiodobenzoic acid, flufenamic acid, folinic acid, a benzothiadiazide, chlorothiazide, a diazepine, indomethicin, a barbiturate, a cephalosporin, a sulfa drug, an antidiabetic, an antibacterial or an antibiotic.

### 5′-Stabilized End Cap

[0334] Further disclosed herein are siNA molecules comprising a 5′-stabilized end cap. As used herein the terms “5′-stabilized end cap” and “5′ end cap” are used interchangeably. In some embodiments, a 2′-O methyl nucleotide in any of sense strands or first nucleotide sequences disclosed herein is replaced with a nucleotide containing a 5′-stabilized end cap. In some embodiments, a 2′-O methyl nucleotide in any of antisense strands or second nucleotide sequences disclosed herein is replaced with a nucleotide containing a 5′-stabilized end cap. In some embodiments, a 2′-O methyl nucleotide in any of sense strands or first nucleotide sequences disclosed herein is further modified to contain a 5′-stabilized end cap. In some embodiments, a 2′-O methyl nucleotide in any of antisense strands or second nucleotide sequences disclosed herein is further modified to contain a 5′-stabilized end cap.

[0335] In some embodiments, the 5′-stabilized end cap is a 5′ phosphate mimic. In some embodiments, the 5′-stabilized end cap is a modified 5′ phosphate mimic. In some embodiments, the modified 5′ phosphate is a chemically modified 5′ phosphate. In some embodiments, the 5′-stabilized end cap is a 5′-vinyl phosphonate. In some embodiments, the 5′-vinyl phosphonate is a 5′-(E)-vinyl phosphonate or 5′-(Z)-vinyl phosphonate. In some embodiments, the 5′-vinyl phosphonate is a deuterated vinyl phosphonate. In some embodiments, the deuterated vinyl phosphonate is a mono-deuterated vinyl phosphonate. In some embodiments, the deuterated vinyl phosphonate is a di-deuterated vinyl phosphonate. In some embodiments, the 5′-stabilized end cap is a phosphate mimic. Examples of phosphate mimics are disclosed in Parmar et al., 2018, J Med Chem, 61(3): 734-744, International Publication Nos. WO2018/045317 and WO2018/044350, and U.S. Pat. No. 10,087,210, each of which is incorporated by reference in its entirety.

[0336] In some aspects, the present disclosure provides siNA comprising a nucleotide phosphate mimic selected from:

[chemical structure]

wherein R_{y} is a nucleobase and R¹⁵ is H or CH₃. In some embodiments, the nucleobase is selected from thymine, cytosine, guanine, adenine, uracil, and an analogue or derivative thereof. In some embodiments, the disclosed nucleotide phosphate mimics include, but are not limited to, the structures:

[chemical structure]

[chemical structure]

[chemical structure]

[chemical structure]

[chemical structure]

wherein R¹⁵ is H or CH₃.

[0337] In some aspects, the present disclosure provides siNA comprising a nucleotide phosphate mimic selected from:

[chemical structure]

when R¹⁵ is CH₃); where R¹⁵ is H or CH₃. In some embodiments, one of these novel nucleotide phosphate mimics (e.g., omeco-d3 nucleotide, 4 h nucleotide, v-mun nucleotide, c20-4 h nucleotide, omeco-munb nucleotide, or d2vm nucleotide) are located at the 5′ end of the antisense strand; however, these novel nucleotide phosphate mimics may also be incorporated at the 5′ end of the sense strand, the 3′ end of the antisense strand, or the 3′ end of the sense strand.

[0338] Additionally or alternatively, the siNA molecules disclosed herein may comprise in the sense strand, the antisense strand, or both a 5′-stabilized end cap of Formula (Ia):

[chemical structure]

wherein Rₓ is H, a nucleobase, aryl, or heteroaryl; R²⁶ is

[chemical structure]

—CH═CD-Z, —CD═CH—Z, —CD═CD-Z, —(CR²¹R²²)ₙ—Z, or —(C₂-C₆ alkenylene)-Z and R²⁰ is H; or R²⁶ and R²⁰ together form a 3- to 7-membered carbocyclic ring substituted with —(CR²¹R²²)ₙ—Z or —(C₂-C₆ alkenylene)-Z; n is 1, 2, 3, or 4; Z is —ONR²³R²⁴, —OP(O)OH(CH₂)ₘCO₂R²³, —OP(S)OH(CH₂)ₘCO₂R²³, —P(O)(OH)₂, —P(O)(OH)(OCH₃), —P(O)(OH)(OCD₃), —SO₂(CH₂)ₘP(O)(OH)₂, —SO₂NR²³R²⁵, —NR²³R²⁴, —NR²³SO₂R²⁴; either R²¹ and R²² are independently hydrogen or C₁-C₆ alkyl, or R²¹ and R²² together form an oxo group; R²³ is hydrogen or C₁-C₆ alkyl; R²⁴ is —SO₂R²⁵ or —C(O)R²⁵; or R²³ and R²⁴ together with the nitrogen to which they are attached form a substituted or unsubstituted heterocyclic ring; R²⁵ is C₁-C₆ alkyl; and m is 1, 2, 3, or 4. In some embodiments, R¹ is an aryl. In some embodiments, the aryl is a phenyl.

[0339] Additionally or alternatively, the siNA molecules disclosed herein may comprise in the sense strand, the antisense strand, or both a 5′-stabilized end cap of Formula (Ib):

[chemical structure]

wherein Rₓ is H, a nucleobase, aryl, or heteroaryl; R²⁶ is

[chemical structure]

—CH═CD-Z, —CD═CH—Z, —CD═CD-Z, —(CR²¹R²²)ₙ—Z, or —(C₂-C₆ alkenylene)-Z and R²⁰ is H; or R²⁶ and R²⁰ together form a 3- to 7-membered carbocyclic ring substituted with —(CR²¹R²²)ₙ—Z or —(C₂-C₆ alkenylene)-Z; n is 1, 2, 3, or 4; Z is —ONR²³R²⁴, —OP(O)OH(CH₂)ₘCO₂R²³, —OP(S)OH(CH₂)ₘCO₂R²³, —P(O)(OH)₂, —P(O)(OH)(OCH₃), —P(O)(OH)(OCD₃), —SO₂(CH₂)ₘP(O)(OH)₂, —SO₂NR²³R²⁵, —NR²³R²⁴, —NR²³SO₂R²⁴; either R²¹ and R²² are independently hydrogen or C₁-C₆ alkyl, or R²¹ and R²² together form an oxo group; R²³ is hydrogen or C₁-C₆ alkyl; R²⁴ is —SO₂R²⁵ or —C(O)R²⁵; or R²³ and R²⁴ together with the nitrogen to which they are attached form a substituted or unsubstituted heterocyclic ring; R²⁵ is C₁-C₆ alkyl; and m is 1, 2, 3, or 4. In some embodiments, R¹ is an aryl. In some embodiments, the aryl is a phenyl.

[0340] Additionally or alternatively, the siNA molecules disclosed herein may comprise in the sense strand, the antisense strand, or both a 5′-stabilized end cap of Formula (Ic):

[chemical structure]

wherein Rₓ is a nucleobase, aryl, heteroaryl, or H, R²⁶ is

[chemical structure]

—CH═CD-Z, —CD═CH—Z, —CD═CD-Z, —(CR²¹R²²)ₙ—Z, or —(C₂-C₆ alkenylene)-Z and R²⁰ is hydrogen; or R²⁶ and R²⁰ together form a 3- to 7-membered carbocyclic ring substituted with —(CR²¹R²²), —Z or —(C₂-C₆ alkenylene)-Z; n is 1, 2, 3, or 4; Z is —ONR²³R²⁴, —OP(O)OH(CH₂)ₘCO₂R²³, —OP(S)OH(CH₂)ₘCO₂R²³, —P(O)(OH)₂, —P(O)(OH)(OCH₃), —P(O)(OH)(OCD₃), —SO₂(CH₂)ₘP(O)(OH)₂, —SO₂NR²³R²⁵, —NR²³R²⁴, or —NR²³SO₂R²⁴; R²¹ and R²² either are independently hydrogen or C₁-C₆ alkyl, or R²¹ and R²² together form an oxo group; R²³ is hydrogen or C₁-C₆ alkyl; R²⁴ is —SO₂R²⁵ or —C(O)R²⁵; or

[0341] R²³ and R²⁴ together with the nitrogen to which they are attached form a substituted or unsubstituted heterocyclic ring; R²⁵ is C₁-C₆ alkyl; and m is 1, 2, 3, or 4. In some embodiments, R¹ is an aryl. In some embodiments, the aryl is a phenyl.

[0342] Additionally or alternatively, the siNA molecules disclosed herein may comprise in the sense strand, the antisense strand, or both a 5′-stabilized end cap of Formula (IIa):

[chemical structure]

wherein Rₓ is a nucleobase, aryl, heteroaryl, or H, R²⁶ is

[chemical structure]

—CH₂SO₂NHCH₃, or

[chemical structure]

R⁹ is —SO₂CH₃ or —COCH₃, [symbol] is a double or single bond, R¹⁰═—CH₂PO₃H or —NHCH₃, R¹¹ is —CH₂— or —CO—, and R¹² is H and R¹³ is CH₃ or R¹² and R₁₃ together form —CH₂CH₂CH₂—. In some embodiments, R¹ is an aryl. In some embodiments, the aryl is a phenyl.

[0343] Additionally or alternatively, the siNA molecules disclosed herein may comprise in the sense strand, the antisense strand, or both a 5′-stabilized end cap of Formula (IIb):

[chemical structure]

wherein Rₓ is a nucleobase, aryl, heteroaryl, or H, R²⁶ is

[chemical structure]

—CH₂SO₂NHCH₃, or

[chemical structure]

R⁹ is —SO₂CH₃ or —COCH₃, [symbol] is a double or single bond, R¹⁰═—CH₂PO₃H or —NHCH₃, R¹¹ is —CH₂— or —CO—, and R¹² is H and R¹³ is CH₃ or R¹² and R₁₃ together form —CH₂CH₂CH₂—. In some embodiments, R¹ is an aryl. In some embodiments, the aryl is a phenyl.

[0344] Additionally or alternatively, the siNA molecules disclosed herein may comprise in the sense strand, the antisense strand, or both a 5′-stabilized end cap of Formula (III):

[chemical structure]

wherein Rₓ is a nucleobase, aryl, heteroaryl, or H, L is —CH₂—, —CH═CH—, —CO—, or —CH₂CH₂—, and A is —ONHCOCH₃, —ONHSO₂CH₃, —PO₃H, —OP(SOH)CH₂CO₂H, —SO₂CH₂PO₃H, —SO₂NHCH₃, —NHSO₂CH₃, or —N(SO₂CH₂CH₂CH₂). In some embodiments, R¹ is an aryl. In some embodiments, the aryl is a phenyl.

[0345] Additionally or alternatively, the siNA molecules disclosed herein may comprise a 5′-stabilized end cap selected from the group consisting of Formula (1) to Formula (16), Formula (9X) to Formula (12X), Formula (16X), Formula (9Y) to Formula (12Y), Formula (16Y), Formula (21) to Formula (36), Formula 36X, Formula (41) to (56), Formula (49X) to (52X), Formula (49Y) to (52Y), Formula 56X, Formula 56Y, Formula (61) and Formula (62):

[chemical structure]

[chemical structure]

[chemical structure]

[chemical structure]

[chemical structure]

[chemical structure]

[chemical structure]

[chemical structure]

[chemical structure]

[chemical structure]

[chemical structure]

wherein Rₓ is a nucleobase, aryl, heteroaryl, or H.

[0346] In some embodiments, any of the siNA molecules disclosed herein comprise a 5′-stabilized end cap selected from the group consisting of Formula (50), Formula (50X), Formula (50Y), Formula (56), Formula (56X), Formula (56Y), Formula (61), and Formula (62):

[chemical structure]

[chemical structure]

wherein Rₓ is a nucleobase, aryl, heteroaryl, or H.

[0347] In some embodiments, any of the siNA molecules disclosed herein comprise a 5′-stabilized end cap selected from the group consisting of Formula (71) to Formula (86), Formula (79X) to Formula (82X), Formula (79Y) to (82Y), Formula 86X, Formula 86X′, Formula 86Y, and Formula 86Y′:

[chemical structure]

[chemical structure]

[chemical structure]

[chemical structure]

wherein Rₓ is a nucleobase, aryl, heteroaryl, or H.

[0348] In some embodiments, any of the siNA molecules disclosed herein comprise a 5′-stabilized end cap selected from the group consisting of Formula (78), Formula (79), Formula (79X), Formula (79Y), Formula (86), Formula (86X), and Formula (86X′):

[chemical structure]

wherein Rₓ is a nucleobase, aryl, heteroaryl, or H.

[0349] In some embodiments, any of the siNA molecules disclosed herein comprise a 5′-stabilized end cap selected from the group consisting of Formulas (1A)-(15A), Formulas (1A-1)-(7A-1), Formulas (1A-2)-(7A-2), Formulas (1A-3)-(7A-3), Formulas (1A-4)-(7A-4), Formulas (9B)-(12B), Formulas (9AX)-(12AX), Formulas (9AY)-(12AY), Formulas (9BX)-(12BX), and Formulas (9BY)-(12BY):

[chemical structure]

[chemical structure]

[chemical structure]

[chemical structure]

[chemical structure]

[chemical structure]

[chemical structure]

[chemical structure]

[chemical structure]

[chemical structure]

[chemical structure]

[chemical structure]

[0350] In some embodiments, any of the siNA molecules disclosed herein comprise a 5′-stabilized end cap selected from the group consisting of Formulas (21A)-(35A), Formulas (29B)-(32B), Formulas (29AX)-(32AX), Formulas (29AY)-(32AY), Formulas (29BX)-(32BX), and Formulas (29BY)-(32BY):

[chemical structure]

[chemical structure]

[chemical structure]

[chemical structure]

[chemical structure]

[chemical structure]

[chemical structure]

[0351] In some embodiments, any of the siNA molecules disclosed herein comprise a 5′-stabilized end cap selected from the group consisting of Formulas (71A)-(86A), Formulas (79XA)-(82XA), Formulas (79YA)-(82YA); Formula (86XA), Formula (86X′A), Formula (86Y), and Formula (86Y′):

[chemical structure]

[chemical structure]

[chemical structure]

[chemical structure]

[chemical structure]

[chemical structure]

[0352] In some embodiments, any of the siNA molecules disclosed herein comprise a 5′-stabilized end cap selected from the group consisting of Formula (78A), Formula (79A), Formula (79XA), Formula (79YA), Formula (86A), Formula (86XA), and Formula (86X′A):

[chemical structure]

[chemical structure]

[0353] In some embodiments, the 5′-stabilized end cap is attached to the 5′ end of the antisense strand. In some embodiments, the 5′-stabilized end cap is attached to the 5′ end of the antisense strand via 1, 2, 3, 4, or 5 or more linkers. In some embodiments, the one or more linkers are independently selected from the group consisting of a phosphodiester (p or po) linker, phosphorothioate (ps) linker, mesyl phosphoramidate (Ms) linker, phosphoramidite (HEG) linker, triethylene glycol (TEG) linker, and/or phosphorodithioate linker. In some embodiments, the one or more linkers are independently selected from the group consisting of p-(PS)2, (PS)2-p-TEG-p, (PS)2-p-HEG-p, and (PS)2-p-(HEG-p)2.

[0354] As indicated above, the present disclosure provides compositions comprising any of the siNA molecules, sense strands, antisense strands, first nucleotide sequences, or second nucleotide sequences described herein. The disclosed siNA and compositions thereof can be used in the treatment of various diseases and conditions (e.g., viral diseases, liver disease, etc.).

### Linker

[0355] In some embodiments, any of the siNAs, sense strands, first nucleotide sequences, antisense strands, and/or second nucleotide sequences disclosed herein comprise 1, 2, 3, 4, 5, 6, 7, 8, 9, 10, 11, 12, 13, 14, 15, 16, 17, 18, 19, 20, 21, 22, 23 or more internucleoside linkers. In some embodiments, 1, 2, 3, 4, 5, 6, 7, 8, 9, 10 or more internucleoside linkers are independently selected from the group consisting of a phosphodiester (p or po) linker, phosphorothioate (ps) linker, mesyl phosphoramidate (Ms) linker, or phosphorodithioate linker.

[0356] In some embodiments, any of the siNAs, sense strands, first nucleotide sequences, antisense strands, and/or second nucleotide sequences disclosed herein further comprise 1, 2, 3, 4 or more linkers that attach a conjugated moiety, phosphorylation blocker, and/or 5′ end cap to the siNA, sense strand, first nucleotide sequence, antisense strand, and/or second nucleotide sequences. In some embodiments, the 1, 2, 3, 4 or more linkers are independently selected from the group consisting of a phosphodiester (p or po) linker, phosphorothioate (ps) linker, mesyl phosphoramidate (Ms), phosphoramidite (HEG) linker, triethylene glycol (TEG) linker, and/or phosphorodithioate linker. In some embodiments, the one or more linkers are independently selected from the group consisting of p-(PS)2, (PS)2-p-TEG-p, (PS)2-p-HEG-p, and (PS)2-p-(HEG-p)2.

### Target Gene

[0357] Without wishing to be bound by theory, upon entry into a cell, any of the ds-siNA molecules disclosed herein may interact with proteins in the cell to form a RNA-Induced Silencing Complex (RISC). Once the ds-siNA is part of the RISC, the ds-siNA may be unwound to form a single-stranded siNA (ss-siNA). The ss-siNA may comprise the antisense strand of the ds-siNA. The antisense strand may bind to a complementary messenger RNA (mRNA), which results in silencing of the gene that encodes the mRNA.

[0358] The target gene may be any hydroxysteroid dehydrogenase gene. In any embodiment, the gene is hydroxysteroid 17-beta dehydrogenase 13 (HSD17B13). The HSD17B13 has a sequence shown in the nucleotide sequence of SEQ ID NO: 261, which corresponds to the nucleotide sequence of the coding sequence of GenBank Accession No. NM_178135.5 (nucleotides 42 to 944), which is incorporated by reference in its entirety.

[0359] In some embodiments, the second nucleotide sequence is at least about 60%, 65%, 70%, 75%, 80%, 85%, 90%, 95%, or 100% complementary to 15 to 30, 15 to 25, 15 to 23, 15 to 22, 15 to 21, 17 to 25, 17 to 23, 17 to 22, 17 to 21, or 19 to 21 nucleotides within SEQ ID NO: 261.

[0360] In some embodiments, the first nucleotide is at least about 60%, 65%, 70%, 75%, 80%, 85%, 90%, 95%, or 100% identical to a nucleotide region within SEQ ID NO: 261, with the exception that the thymines (Ts) in SEQ ID NO: 261 are replaced with uracil (U). In some embodiments, the first nucleotide sequence is at least about 60%, 65%, 70%, 75%, 80%, 85%, 90%, 95%, or 100% identical to 15 to 30, 15 to 25, 15 to 23, 15 to 22, 15 to 21, 17 to 25, 17 to 23, 17 to 22, 17 to 21, or 19 to 21 nucleotides within SEQ ID NO: 261.

### Compositions

[0361] As indicated above, the present disclosure provides compositions comprising any of the siNA molecules, sense strands, antisense strands, first nucleotide sequences, or second nucleotide sequences described herein. The compositions may comprise 1, 2, 3, 4, 5, 6, 7, 8, 9, 10, 11, 12 or more siNA molecules described herein. The compositions may comprise a first nucleotide sequence comprising a nucleotide sequence of any one SEQ ID NOs: 1-100, 201-230, 262-287, 314, and 315. In some embodiments, the composition comprises a second nucleotide sequence comprising a nucleotide sequence of any one of SEQ ID NOs: 101-200, 231-260, and 288-313. In some embodiments, the composition comprises a sense strand comprising a nucleotide sequence of any one of SEQ ID NOs: 1-100, 201-230, 262-287, 314, or 315. In some embodiments, the composition comprises an antisense strand comprising a nucleotide sequence of any one of SEQ ID NOs: 101-200, 231-260, or 288-313.

[0362] Alternatively, the compositions may comprise (a) a phosphorylation blocker; and (b) a short interfering nucleic acid (siNA). In some embodiments, the phosphorylation blocker is any of the phosphorylation blockers disclosed herein. In some embodiments, the siNA is any of the siNAs disclosed herein. In some embodiments, the siNA comprises any of the sense strands, antisense strands, first nucleotide sequences, or second nucleotide sequences described herein. In some embodiments, the siNA comprises any of the sense strands, antisense strands, first nucleotide sequences, or second nucleotide sequences described herein. In some embodiments, the siNA comprises one or more modified nucleotides. In some embodiments, the one or more modified nucleotides are independently selected from a 2′-fluoro nucleotide and a 2′-O methyl nucleotide. In some embodiments, the 2′-fluoro nucleotide or the 2′-O methyl nucleotide is independently selected from any of the 2′-fluoro or 2′-O methyl nucleotide mimics disclosed herein. In some embodiments, the siNA comprises a nucleotide sequence comprising any of the modification patterns disclosed herein.

[0363] In some embodiments, the composition comprises (a) a conjugated moiety; and (b) a short interfering nucleic acid (siNA). In some embodiments, the conjugated moiety is any of the galactosamines disclosed herein. In some embodiments, the siNA is any of the siNAs disclosed herein. In some embodiments, the siNA comprises any of the sense strands, antisense strands, first nucleotide sequences, or second nucleotide sequences described herein. In some embodiments, the siNA comprises any of the sense strands, antisense strands, first nucleotide sequences, or second nucleotide sequences described herein. In some embodiments, the siNA comprises one or more modified nucleotides. In some embodiments, the one or more modified nucleotides are independently selected from a 2′-fluoro nucleotide and a 2′-O methyl nucleotide. In some embodiments, the 2′-fluoro nucleotide or the 2′-O methyl nucleotide is independently selected from any of the 2′-fluoro or 2′-O methyl nucleotide mimics disclosed herein. In some embodiments, the siNA comprises a nucleotide sequence comprising any of the modification patterns disclosed herein.

[0364] In some embodiments, the composition comprises (a) a 5′-stabilized end cap; and (b) a short interfering nucleic acid (siNA). In some embodiments, the 5′-stabilized end cap is any of the 5-stabilized end caps disclosed herein. In some embodiments, the siNA is any of the siNAs disclosed herein. In some embodiments, the siNA comprises any of the sense strands, antisense strands, first nucleotide sequences, or second nucleotide sequences described herein. In some embodiments, the siNA comprises one or more modified nucleotides. In some embodiments, the one or more modified nucleotides are independently selected from a 2′-fluoro nucleotide and a 2′-O methyl nucleotide. In some embodiments, the 2′-fluoro nucleotide or the 2′-O methyl nucleotide is independently selected from any of the 2′-fluoro or 2′-O methyl nucleotide mimics disclosed herein. In some embodiments, the siNA comprises a nucleotide sequence comprising any of the modification patterns disclosed herein.

[0365] In some embodiments, the composition comprises (a) at least one phosphorylation blocker, conjugated moiety, or 5′-stabilized end cap; and (b) a short interfering nucleic acid (siNA). In some embodiments, the phosphorylation blocker is any of the phosphorylation blockers disclosed herein. In some embodiments, the conjugated moiety is any of the galactosamines disclosed herein. In some embodiments, the 5′-stabilized end cap is any of the 5-stabilized end caps disclosed herein. In some embodiments, the siNA is any of the siNAs disclosed herein. In some embodiments, the siNA comprises any of the sense strands, antisense strands, first nucleotide sequences, or second nucleotide sequences described herein. In some embodiments, the siNA comprises one or more modified nucleotides. In some embodiments, the one or more modified nucleotides are independently selected from a 2′-fluoro nucleotide and a 2′-O methyl nucleotide. In some embodiments, the 2′-fluoro nucleotide or the 2′-O methyl nucleotide is independently selected from any of the 2′-fluoro or 2′-O methyl nucleotide mimics disclosed herein. In some embodiments, the siNA comprises a nucleotide sequence comprising any of the modification patterns disclosed herein.

[0366] The composition may be a pharmaceutical composition. In some embodiments, the pharmaceutical composition comprises an amount of one or more of the siNA molecules described herein formulated with one or more pharmaceutically acceptable carriers (additives) and/or diluents. The pharmaceutical compositions may be specially formulated for administration in solid or liquid form, including those adapted for the following: (1) oral administration, for example, drenches (aqueous or non-aqueous solutions or suspensions), tablets, e.g., those targeted for buccal, sublingual, and systemic absorption, boluses, powders, granules, pastes for application to the tongue; (2) parenteral administration, for example, by subcutaneous, intramuscular, intravenous or epidural injection as, for example, a sterile solution or suspension, or sustained-release formulation; (3) topical application, for example, as a cream, ointment, or a controlled-release patch or spray applied to the skin; (4) intravaginally or intrarectally, for example, as a pessary, cream or foam; (5) sublingually; (6) ocularly; (7) transdermally; or (8) nasally.

[0367] The composition may be a pharmaceutical composition. In some embodiments, the pharmaceutical composition comprises an amount of one or more of the siNA molecules described herein formulated with one or more pharmaceutically acceptable carriers (additives) and/or diluents. The pharmaceutical compositions may be specially formulated for administration in solid or liquid form, including those adapted for the following: (1) oral administration, for example, drenches (aqueous or non-aqueous solutions or suspensions), tablets, e.g., those targeted for buccal, sublingual, and systemic absorption, boluses, powders, granules, pastes for application to the tongue; (2) parenteral administration, for example, by subcutaneous, intramuscular, intravenous or epidural injection as, for example, a sterile solution or suspension, or sustained-release formulation; (3) topical application, for example, as a cream, ointment, or a controlled-release patch or spray applied to the skin; (4) intravaginally or intrarectally, for example, as a pessary, cream or foam; (5) sublingually; (6) ocularly; (7) transdermally; or (8) nasally.

[0368] The phrase “therapeutically-effective amount” as used herein means that amount of a compound, material, or composition comprising a siNA of the present disclosure which is effective for producing some desired therapeutic effect in at least a sub-population of cells in an animal at a reasonable benefit/risk ratio applicable to any medical treatment.

[0369] The phrase “pharmaceutically acceptable” is employed herein to refer to those compounds, materials, compositions, and/or dosage forms which are, within the scope of sound medical judgment, suitable for use in contact with the tissues of human beings and animals without excessive toxicity, irritation, allergic response, or other problem or complication, commensurate with a reasonable benefit/risk ratio.

[0370] Wetting agents, emulsifiers and lubricants, such as sodium lauryl sulfate and magnesium stearate, as well as coloring agents, release agents, coating agents, sweetening, flavoring and perfuming agents, preservatives and antioxidants can also be present in the compositions.

[0371] Examples of pharmaceutically-acceptable antioxidants include: (1) water soluble antioxidants, such as ascorbic acid, cysteine hydrochloride, sodium bisulfate, sodium metabisulfite, sodium sulfite and the like; (2) oil-soluble antioxidants, such as ascorbyl palmitate, butylated hydroxyanisole (BHA), butylated hydroxytoluene (BHT), lecithin, propyl gallate, alpha-tocopherol, and the like; and (3) metal chelating agents, such as citric acid, ethylenediamine tetraacetic acid (EDTA), sorbitol, tartaric acid, phosphoric acid, and the like.

[0372] Formulations of the present disclosure include those suitable for oral, nasal, topical (including buccal and sublingual), rectal, vaginal and/or parenteral administration. The formulations may conveniently be presented in unit dosage form and may be prepared by any methods well known in the art of pharmacy. The amount of active ingredient which can be combined with a carrier material to produce a single dosage form will vary depending upon the host being treated, the particular mode of administration. The amount of active ingredient which can be combined with a carrier material to produce a single dosage form will generally be that amount of the compound (e.g., siNA molecule) which produces a therapeutic effect. Generally, out of one hundred percent, this amount will range from about 0.1 percent to about ninety-nine percent of active ingredient, preferably from about 5 percent to about 70 percent, most preferably from about 10 percent to about 30 percent.

[0373] In certain embodiments, a formulation of the present disclosure comprises an excipient selected from the group consisting of cyclodextrins, celluloses, liposomes, micelle forming agents, e.g., bile acids, and polymeric carriers, e.g., polyesters and polyanhydrides; and a compound (e.g., siNA molecule) of the present disclosure. In certain embodiments, an aforementioned formulation renders orally bioavailable a compound (e.g., siNA molecule) of the present disclosure.

[0374] Methods of preparing these formulations or compositions include the step of bringing into association a compound (e.g., siNA molecule) of the present disclosure with the carrier and, optionally, one or more accessory ingredients. In general, the formulations are prepared by uniformly and intimately bringing into association a compound (e.g., siNA molecule) of the present disclosure with liquid carriers, or finely divided solid carriers, or both, and then, if necessary, shaping the product.

[0375] Formulations of the disclosure suitable for oral administration may be in the form of capsules, cachets, pills, tablets, lozenges (using a flavored basis, usually sucrose and acacia or tragacanth), powders, granules, or as a solution or a suspension in an aqueous or non-aqueous liquid, or as an oil-in-water or water-in-oil liquid emulsion, or as an elixir or syrup, or as pastilles (using an inert base, such as gelatin and glycerin, or sucrose and acacia) and/or as mouth washes and the like, each containing a predetermined amount of a compound (e.g., siNA molecule) of the present disclosure as an active ingredient. A compound (e.g., siNA molecule) of the present disclosure may also be administered as a bolus, electuary or paste.

[0376] In solid dosage forms of the disclosure for oral administration (capsules, tablets, pills, dragees, powders, granules, trouches and the like), the active ingredient is mixed with one or more pharmaceutically-acceptable carriers, such as sodium citrate or dicalcium phosphate, and/or any of the following: (1) fillers or extenders, such as starches, lactose, sucrose, glucose, mannitol, and/or silicic acid; (2) binders, such as, for example, carboxymethylcellulose, alginates, gelatin, polyvinyl pyrrolidone, sucrose and/or acacia; (3) humectants, such as glycerol; (4) disintegrating agents, such as agar-agar, calcium carbonate, potato or tapioca starch, alginic acid, certain silicates, and sodium carbonate; (5) solution retarding agents, such as paraffin; (6) absorption accelerators, such as quaternary ammonium compounds and surfactants, such as poloxamer and sodium lauryl sulfate; (7) wetting agents, such as, for example, cetyl alcohol, glycerol monostearate, and non-ionic surfactants; (8) absorbents, such as kaolin and bentonite clay; (9) lubricants, such as talc, calcium stearate, magnesium stearate, solid polyethylene glycols, sodium lauryl sulfate, zinc stearate, sodium stearate, stearic acid, and mixtures thereof; (10) coloring agents; and (11) controlled release agents such as crospovidone or ethyl cellulose.

[0377] In the case of capsules, tablets and pills, the pharmaceutical compositions may also comprise buffering agents. Solid compositions of a similar type may also be employed as fillers in soft and hard-shelled gelatin capsules using such excipients as lactose or milk sugars, as well as high molecular weight polyethylene glycols and the like.

[0378] A tablet may be made by compression or molding, optionally with one or more accessory ingredients. Compressed tablets may be prepared using binder (for example, gelatin or hydroxypropylmethyl cellulose), lubricant, inert diluent, preservative, disintegrant (for example, sodium starch glycolate or cross-linked sodium carboxymethyl cellulose), surface-active or dispersing agent. Molded tablets may be made by molding in a suitable machine a mixture of the powdered compound moistened with an inert liquid diluent.

[0379] The tablets, and other solid dosage forms of the pharmaceutical compositions of the present disclosure, such as dragees, capsules, pills and granules, may optionally be scored or prepared with coatings and shells, such as enteric coatings and other coatings well known in the pharmaceutical-formulating art. They may also be formulated so as to provide slow or controlled release of the active ingredient therein using, for example, hydroxypropylmethyl cellulose in varying proportions to provide the desired release profile, other polymer matrices, liposomes and/or microspheres. They may be formulated for rapid release, e.g., freeze-dried.

[0380] They may be sterilized by, for example, filtration through a bacteria-retaining filter, or by incorporating sterilizing agents in the form of sterile solid compositions which can be dissolved in sterile water, or some other sterile injectable medium immediately before use. These compositions may also optionally contain opacifying agents and may be of a composition that they release the active ingredient(s) only, or preferentially, in a certain portion of the gastrointestinal tract, optionally, in a delayed manner. Examples of embedding compositions which can be used include polymeric substances and waxes. The active ingredient can also be in micro-encapsulated form, if appropriate, with one or more of the above-described excipients.

[0381] Liquid dosage forms for oral administration of the compounds (e.g., siNA molecules) of the disclosure include pharmaceutically acceptable emulsions, microemulsions, solutions, suspensions, syrups and elixirs. In addition to the active ingredient, the liquid dosage forms may contain inert diluents commonly used in the art, such as, for example, water or other solvents, solubilizing agents and emulsifiers, such as ethyl alcohol, isopropyl alcohol, ethyl carbonate, ethyl acetate, benzyl alcohol, benzyl benzoate, propylene glycol, 1,3-butylene glycol, oils (I particular, cottonseed, groundnut, corn, germ, olive, castor and sesame oils), glycerol, tetrahydrofuryl alcohol, polyethylene glycols and fatty acid esters of sorbitan, and mixtures thereof.

[0382] Besides inert diluents, the oral compositions can also include adjuvants such as wetting agents, emulsifying and suspending agents, sweetening, flavoring, coloring, perfuming and preservative agents.

[0383] Suspensions, in addition to the active compounds (e.g., siNA molecules), may contain suspending agents as, for example, ethoxylated isostearyl alcohols, polyoxyethylene sorbitol and sorbitan esters, microcrystalline cellulose, aluminum metahydroxide, bentonite, agar-agar and tragacanth, and mixtures thereof.

[0384] Formulations of the pharmaceutical compositions of the disclosure for rectal or vaginal administration may be presented as a suppository, which may be prepared by mixing one or more compounds (e.g., siNA molecules) of the disclosure with one or more suitable nonirritating excipients or carriers comprising, for example, cocoa butter, polyethylene glycol, a suppository wax or a salicylate, and which is solid at room temperature, but liquid at body temperature and, therefore, will melt in the rectum or vaginal cavity and release the active compound (e.g., siNA molecule).

[0385] Formulations of the present disclosure which are suitable for vaginal administration also include pessaries, tampons, creams, gels, pastes, foams or spray formulations containing such carriers as are known in the art to be appropriate.

[0386] Dosage forms for the topical or transdermal administration of a compound (e.g., siNA molecule) of this disclosure include powders, sprays, ointments, pastes, creams, lotions, gels, solutions, patches and inhalants. The active compound (e.g., siNA molecule) may be mixed under sterile conditions with a pharmaceutically acceptable carrier, and with any preservatives, buffers, or propellants which may be required.

[0387] The ointments, pastes, creams and gels may contain, in addition to an active compound (e.g., siNA molecule) of this disclosure, excipients, such as animal and vegetable fats, oils, waxes, paraffins, starch, tragacanth, cellulose derivatives, polyethylene glycols, silicones, bentonites, silicic acid, talc and zinc oxide, or mixtures thereof.

[0388] Powders and sprays can contain, in addition to a compound (e.g., siNA molecule) of this disclosure, excipients such as lactose, talc, silicic acid, aluminum hydroxide, calcium silicates and polyamide powder, or mixtures of these substances. Sprays can additionally contain customary propellants, such as chlorofluorohydrocarbons and volatile unsubstituted hydrocarbons, such as butane and propane.

[0389] Transdermal patches have the added advantage of providing controlled delivery of a compound (e.g., siNA molecule) of the present disclosure to the body. Such dosage forms can be made by dissolving or dispersing the compound (e.g., siNA molecule) in the proper medium. Absorption enhancers can also be used to increase the flux of the compound (e.g., siNA molecule) across the skin. The rate of such flux can be controlled by either providing a rate controlling membrane or dispersing the compound (e.g., siNA molecule) in a polymer matrix or gel.

[0390] Ophthalmic formulations, eye ointments, powders, solutions and the like, are also contemplated as being within the scope of this invention.

[0391] Pharmaceutical compositions of this disclosure suitable for parenteral administration comprise one or more compounds (e.g., siNA molecules) of the disclosure in combination with one or more pharmaceutically-acceptable sterile isotonic aqueous or nonaqueous solutions, dispersions, suspensions or emulsions, or sterile powders which may be reconstituted into sterile injectable solutions or dispersions just prior to use, which may contain sugars, alcohols, antioxidants, buffers, bacteriostats, solutes which render the formulation isotonic with the blood of the intended recipient or suspending or thickening agents.

[0392] Examples of suitable aqueous and nonaqueous carriers which may be employed in the pharmaceutical compositions of the disclosure include water, ethanol, polyols (such as glycerol, propylene glycol, polyethylene glycol, and the like), and suitable mixtures thereof, vegetable oils, such as olive oil, and injectable organic esters, such as ethyl oleate. Proper fluidity can be maintained, for example, by the use of coating materials, such as lecithin, by the maintenance of the required particle size in the case of dispersions, and by the use of surfactants.

[0393] These compositions may also contain adjuvants such as preservatives, wetting agents, emulsifying agents and dispersing agents. Prevention of the action of microorganisms upon the subject compounds may be ensured by the inclusion of various antibacterial and antifungal agents, for example, paraben, chlorobutanol, phenol sorbic acid, and the like. It may also be desirable to include isotonic agents, such as sugars, sodium chloride, and the like into the compositions. In addition, prolonged absorption of the injectable pharmaceutical form may be brought about by the inclusion of agents which delay absorption such as aluminum monostearate and gelatin.

[0394] In some cases, in order to prolong the effect of a drug, it is desirable to slow the absorption of the drug from subcutaneous or intramuscular injection. This may be accomplished by the use of a liquid suspension of crystalline or amorphous material having poor water solubility. The rate of absorption of the drug then depends upon its rate of dissolution which, in turn, may depend upon crystal size and crystalline form. Alternatively, delayed absorption of a parenterally-administered drug form is accomplished by dissolving or suspending the drug in an oil vehicle.

[0395] Injectable depot forms are made by forming microencapsule matrices of the subject compounds (e.g., siNA molecules) in biodegradable polymers such as polylactide-polyglycolide. Depending on the ratio of drug to polymer, and the nature of the particular polymer employed, the rate of drug release can be controlled. Examples of other biodegradable polymers include poly(orthoesters) and poly(anhydrides). Depot injectable formulations are also prepared by entrapping the drug in liposomes or microemulsions which are compatible with body tissue.

[0396] When the compounds (e.g., siNA molecules) of the present disclosure are administered as pharmaceuticals, to humans and animals, they can be given per se or as a pharmaceutical composition containing, for example, 0.1 to 99% (more preferably, 10 to 30%) of active ingredient in combination with a pharmaceutically acceptable carrier.

### Treatments and Administration

[0397] The siNA molecules of the present disclosure may be used to treat a disease in a subject in need thereof. In some embodiments, a method of treating a disease in a subject in need thereof comprises administering to the subject any of the siNA molecules disclosed herein. In some embodiments, a method of treating a disease in a subject in need thereof comprises administering to the subject any of the compositions disclosed herein.

[0398] The preparations (e.g., siNA molecules or compositions) of the present disclosure may be given orally, parenterally, topically, or rectally. They are of course given in forms suitable for each administration route. For example, they are administered in tablets or capsule form, administration by injection, infusion or inhalation; topical by lotion or ointment; and rectal by suppositories. Oral administrations are preferred.

[0399] The phrases “parenteral administration” and “administered parenterally” as used herein means modes of administration other than enteral and topical administration, usually by injection, and includes, without limitation, intravenous, intramuscular, intraarterial, intrathecal, intracapsular, intraorbital, intracardiac, intradermal, intraperitoneal, transtracheal, subcutaneous, subcuticular, intraarticular, subcapsular, subarachnoid, intraspinal and intrasternal injection and infusion.

[0400] The phrases “systemic administration,” “administered systemically,” “peripheral administration” and “administered peripherally” as used herein mean the administration of a compound, drug or other material other than directly into the central nervous system, such that it enters the patient's system and, thus, is subject to metabolism and other like processes, for example, subcutaneous administration.

[0401] These compounds may be administered to humans and other animals for therapy by any suitable route of administration, including orally, nasally, as by, for example, a spray, rectally, intravaginally, parenterally, intracisternally and topically, as by powders, ointments or drops, including buccally and sublingually.

[0402] Regardless of the route of administration selected, the compounds (e.g., siNA molecules) of the present disclosure, which may be used in a suitable hydrated form, and/or the pharmaceutical compositions of the present disclosure, are formulated into pharmaceutically-acceptable dosage forms by conventional methods known to those of skill in the art.

[0403] Actual dosage levels of the active ingredients in the pharmaceutical compositions of this disclosure may be varied so as to obtain an amount of the active ingredient which is effective to achieve the desired therapeutic response for a particular patient, composition, and mode of administration, without being toxic to the patient.

[0404] The selected dosage level will depend upon a variety of factors including the activity of the particular compound (e.g., siNA molecule) of the present disclosure employed, or the ester, salt or amide thereof, the route of administration, the time of administration, the rate of excretion or metabolism of the particular compound being employed, the rate and extent of absorption, the duration of the treatment, other drugs, compounds and/or materials used in combination with the particular compound employed, the age, sex, weight, condition, general health and prior medical history of the patient being treated, and like factors well known in the medical arts.

[0405] A physician or veterinarian having ordinary skill in the art can readily determine and prescribe the effective amount of the pharmaceutical composition required. For example, the physician or veterinarian could start doses of the compounds (e.g., siNA molecules) of the disclosure employed in the pharmaceutical composition at levels lower than that required in order to achieve the desired therapeutic effect and gradually increase the dosage until the desired effect is achieved.

[0406] In general, a suitable daily dose of a compound (e.g., siNA molecule) of the disclosure is the amount of the compound that is the lowest dose effective to produce a therapeutic effect. Such an effective dose generally depends upon the factors described above. Preferably, the compounds are administered at about 0.01 mg/kg to about 200 mg/kg, more preferably at about 0.1 mg/kg to about 100 mg/kg, even more preferably at about 0.5 mg/kg to about 50 mg/kg. In some embodiments, the compound is administered at a dose equal to or greater than 0.01, 0.02, 0.03, 0.04, 0.05, 0.06, 0.07, 0.08, 0.09, 0.10, 0.11, 0.12, 0.13, 0.14, 0.15, 0.16, 0.17, 0.18, 0.19, 0.20, 0.21, 0.22, 0.23, 0.24, 0.25, 0.26, 0.27, 0.28, 0.29, 0.30, 0.35, 0.40, 0.45, 0.50, 0.55, 0.60, 0.65, 0.7, 0.75, 0.8, 0.85, 0.9, 0.95, or 1 mg/kg. In some embodiments, the compound is administered at a dose equal to or less than 200, 190, 180, 170, 160, 150, 140, 130, 120, 110, 100, 95, 90, 85, 80, 75, 70, 65, 60, 55, 50, 45, 40, 35, 30, 25, 20, or 15 mg/kg. In some embodiments, the total daily dose of the compound is equal to or greater than 10, 15, 20, 25, 30, 35, 40, 45, 50, 55, 60, 65, 70, 75, 80, 85, 90, 95, 100, 105, 110, 115, 120, 125, 130, 135, 140, 145, 150, 155, 160, 165, 170, 175, 180, 185, 190, 195, or 100 mg.

[0407] When the compounds (e.g., siNA molecules) described herein are co-administered with another, the effective amount may be less than when the compound is used alone.

[0408] If desired, the effective daily dose of the active compound (e.g., siNA molecule) may be administered as two, three, four, five, six or more sub-doses administered separately at appropriate intervals throughout the day, optionally, in unit dosage forms. Preferred dosing is one administration per day. In some embodiments, the compound is administered at least 1, 2, 3, 4, 5, 6, 7, 8, 9, 10, 11, 12, 13, 14, 15, 16, 17, 18, 19, 20, or 21 times a week. In some embodiments, the compound is administered at least 1, 2, 3, 4, 5, 6, 7, 8, 9, 10, 11, 12, 13, 14, 15, 16, 17, 18, 19, 20, or 21 times a month. In some embodiments, the compound is administered once every 1, 2, 3, 4, 5, 6, 7, 8, 9, 10, 11, 12, 13, 14, 15, 16, 17, 18, 19, 20, or 21 days. In some embodiments, the compound is administered once every 1, 2, 3, 4, 5, 6, 7, or 8 weeks.

### Diseases

[0409] The siNA molecules and compositions described herein may be administered to a subject to treat a disease. Further disclosed herein are uses of any of the siNA molecules or compositions disclosed herein in the manufacture of a medicament for treating a disease.

[0410] In any embodiment, the disease is a liver disease. In any embodiment, the liver disease is nonalcoholic fatty liver disease (NAFLD). In some embodiments, the NAFLD is nonalcoholic steatohepatitis (NASH). In some embodiments, the liver disease is hepatocellular carcinoma (HCC). In some embodiments, the disease is nonalcoholic steatohepatitis (NASH).

Administration of siNA

[0411] Administration of any of the siNAs disclosed herein may be conducted by methods known in the art. In some embodiments, the siNA is administered by subcutaneous (SC) or intravenous (IV) delivery. The preparations (e.g., siNAs or compositions) of the present disclosure may be given orally, parenterally, topically, or rectally. They are of course given in forms suitable for each administration route. For example, they are administered in tablets or capsule form, administration by injection, infusion or inhalation; topical by lotion or ointment; and rectal by suppositories. In some embodiments, subcutaneous administration is preferred.

[0412] The phrases “parenteral administration” and “administered parenterally” as used herein means modes of administration other than enteral and topical administration, usually by injection, and includes, without limitation, intravenous, intramuscular, intraarterial, intrathecal, intracapsular, intraorbital, intracardiac, intradermal, intraperitoneal, transtracheal, subcutaneous, subcuticular, intraarticular, subcapsular, subarachnoid, intraspinal and intrasternal injection and infusion.

[0413] The phrases “systemic administration,” “administered systemically,” “peripheral administration” and “administered peripherally” as used herein mean the administration of a compound, drug or other material other than directly into the central nervous system, such that it enters the patient's system and, thus, is subject to metabolism and other like processes, for example, subcutaneous administration.

[0414] These compounds may be administered to humans and other animals for therapy by any suitable route of administration, including orally, nasally, as by, for example, a spray, rectally, intravaginally, parenterally, intracisternally and topically, as by powders, ointments or drops, including buccally and sublingually.

[0415] Regardless of the route of administration selected, the compounds (e.g., siNAs) of the present disclosure, which may be used in a suitable hydrated form, and/or the pharmaceutical compositions of the present disclosure, are formulated into pharmaceutically-acceptable dosage forms by conventional methods known to those of skill in the art.

[0416] Actual dosage levels of the active ingredients in the pharmaceutical compositions of this disclosure may be varied so as to obtain an amount of the active ingredient which is effective to achieve the desired therapeutic response for a particular patient, composition, and mode of administration, without being toxic to the patient.

[0417] The selected dosage level will depend upon a variety of factors including the activity of the particular compound (e.g., siNA) of the present disclosure employed, or the ester, salt or amide thereof, the route of administration, the time of administration, the rate of excretion or metabolism of the particular compound being employed, the rate and extent of absorption, the duration of the treatment, other drugs, compounds and/or materials used in combination with the particular compound employed, the age, sex, weight, condition, general health and prior medical history of the patient being treated, and like factors well known in the medical arts.

[0418] A physician or veterinarian having ordinary skill in the art can readily determine and prescribe the effective amount of the pharmaceutical composition required. For example, the physician or veterinarian could start doses of the compounds (e.g., siNAs) of the disclosure employed in the pharmaceutical composition at levels lower than that required in order to achieve the desired therapeutic effect and gradually increase the dosage until the desired effect is achieved.

[0419] In some embodiments, the siNA or the composition is administered at a dose of at least 1 mg/kg, 2 mg/kg, 3 mg/kg, 4 mg/kg, 5 mg/kg, 6 mg/kg, 7 mg/kg, 8 mg/kg, 9 mg/kg, 10 mg/kg, 11 mg/kg, 12 mg/kg, 13 mg/kg 14 mg/kg, or 15 mg/kg. In some embodiments, the siNA or the composition is administered at a dose of between 0.5 mg/kg to 50 mg/kg, 0.5 mg/kg to 40 mg/kg 0.5 mg/kg to 30 mg/kg, 1 mg/kg to 50 mg/kg, 1 mg/kg to 40 mg/kg, 1 mg/kg to 30 mg/kg, 1 mg/kg to 20 mg/kg, 3 mg/kg to 50 mg/kg, 3 mg/kg to 40 mg/kg, 3 mg/kg to 30 mg/kg, 3 mg/kg to 20 mg/kg, 3 mg/kg to 15 mg/kg, 3 mg/kg to 10 mg/kg, 4 mg/kg to 50 mg/kg, 4 mg/kg to 40 mg/kg, 4 mg/kg to 30 mg/kg, 4 mg/kg to 20 mg/kg, 4 mg/kg to 15 mg/kg, 4 mg/kg to 10 mg/kg, 5 mg/kg to 50 mg/kg, 5 mg/kg to 40 mg/kg, 5 mg/kg to 30 mg/kg, 5 mg/kg to 20 mg/kg, 5 mg/kg to 15 mg/kg, or 5 mg/kg to 10 mg/kg.

[0420] In some embodiments, the siNA or the composition is administered at least 1, 2, 3, 4, 5, 6, 7, 8, 9, or 10 times. In some embodiments, the siNA or the composition is administered at least 1, 2, 3, 4, 5, 6, 7, 8, 9, or 10 times a day, at least 1, 2, 3, 4, 5, 6, 7, 8, 9, or 10 times a week, or at least 1, 2, 3, 4, 5, 6, 7, 8, 9, or 10 times a month. In some embodiments, the siNA or the composition are administered at least once every 1, 2, 3, 4, 5, 6, 7, 8, 9, 10, 11, 12, 13, 14, 15, 16, 17, 18, 19, 20, or 21 days. In some embodiments, the siNA or the composition is administered for a period of at least 1, 2, 3, 4, 5, 6, 7, 8, 9, 10, 11, 12, 13, 14, 15, 16, 17, 18, 19, 20, or 21 days, or at least 1, 2, 3, 4, 5, 6, 7, 8, 9, 10, 11, 12, 13, 14, 15, 16, 17, 18, 19, 20, 21, 22, 23, 24, 25, 26, 27, 28, 29, 30, 35, 40, 45, 50, 51, 52, 53, 54, or 55 weeks.

[0421] In some embodiments, the siNA or the composition is administered at a single dose of 5 mg/kg. In some embodiments, the siNA or the composition is administered at a single dose of 10 mg/kg. In some embodiments, the siNA or the composition is administered at three doses of 10 mg/kg once a week. In some embodiments, the siNA or the composition is administered at three doses of 10 mg/kg once every three days. In some embodiments, the siNA or the composition is administered at five doses of 10 mg/kg once every three days. In some embodiments, the siNA or the composition is administered at six doses of ranging from 1 mg/kg to 15 mg/kg, 1 mg/kg to 10 mg/kg, 2 mg/kg to 15 mg/kg, 2 mg/kg to 10 mg/kg, 3 mg/kg to 15 mg/kg, or 3 mg/kg to 10 mg/kg. In some embodiments, the first dose and second dose are administered at least 3 days apart. In some embodiments, the second dose and third dose are administered at least 4 days apart. In some embodiments, the third dose and fourth dose, fourth dose and fifth dose, or fifth dose and sixth dose are administered at least 7 days apart.

[0422] In general, a suitable daily dose of a compound (e.g., siNA) of the disclosure is the amount of the compound that is the lowest dose effective to produce a therapeutic effect. Such an effective dose generally depends upon the factors described above. Preferably, the compounds are administered at about 0.01 mg/kg to about 200 mg/kg, more preferably at about 0.1 mg/kg to about 100 mg/kg, even more preferably at about 0.5 mg/kg to about 50 mg/kg. In some embodiments, the compound is administered at about 1 mg/kg to about 40 mg/kg, about 1 mg/kg to about 30 mg/kg, about 1 mg/kg to about 20 mg/kg, about 1 mg/kg to about 15 mg/kg, or 1 mg/kg to about 10 mg/kg. In some embodiments, the compound is administered at a dose equal to or greater than 0.01, 0.02, 0.03, 0.04, 0.05, 0.06, 0.07, 0.08, 0.09, 0.10, 0.11, 0.12, 0.13, 0.14, 0.15, 0.16, 0.17, 0.18, 0.19, 0.20, 0.21, 0.22, 0.23, 0.24, 0.25, 0.26, 0.27, 0.28, 0.29, 0.30, 0.35, 0.40, 0.45, 0.50, 0.55, 0.60, 0.65, 0.7, 0.75, 0.8, 0.85, 0.9, 0.95, or 1 mg/kg. In some embodiments, the compound is administered at a dose equal to or greater than 1, 2, 3, 4, 5, 6, 7, 8, 9, 10, 11, 12, 13, 14, 15, 16, 17, 18, 19, 20, 21, 22, 23, 24, 25, 26, 27, 28, 29, or 30 mg/kg. In some embodiments, the compound is administered at a dose equal to or less than 200, 190, 180, 170, 160, 150, 140, 130, 120, 110, 100, 95, 90, 85, 80, 75, 70, 65, 60, 55, 50, 45, 40, 35, 30, 25, 20, or 15 mg/kg. In some embodiments, the total daily dose of the compound is equal to or greater than 10, 15, 20, 25, 30, 35, 40, 45, 50, 55, 60, 65, 70, 75, 80, 85, 90, 95, 100, 105, 110, 115, 120, 125, 130, 135, 140, 145, 150, 155, 160, 165, 170, 175, 180, 185, 190, 195, or 100 mg.

[0423] If desired, the effective daily dose of the active compound (e.g., siNA) may be administered as two, three, four, five, six, seven, eight, nine, ten or more doses or sub-doses administered separately at appropriate intervals throughout the day, optionally, in unit dosage forms. In some embodiments, the compound is administered at least 1, 2, 3, 4, 5, 6, 7, 8, 9, 10, 11, 12, 13, 14, or 15 times. Preferred dosing is one administration per day. In some embodiments, the compound is administered at least 1, 2, 3, 4, 5, 6, 7, 8, 9, 10, 11, 12, 13, 14, 15, 16, 17, 18, 19, 20, or 21 times a week. In some embodiments, the compound is administered at least 1, 2, 3, 4, 5, 6, 7, 8, 9, 10, 11, 12, 13, 14, 15, 16, 17, 18, 19, 20, or 21 times a month. In some embodiments, the compound is administered once every 1, 2, 3, 4, 5, 6, 7, 8, 9, 10, 11, 12, 13, 14, 15, 16, 17, 18, 19, 20, or 21 days. In some embodiments, the compound is administered every 3 days. In some embodiments, the compound is administered once every 1, 2, 3, 4, 5, 6, 7, 8, 9, 10, 11, 12, 13, 14, or 15 weeks. In some embodiments, the compound is administered every month. In some embodiments, the compound is administered once every 1, 2, 3, 4, 5, 6, 7, 8, 9, 10, 11, 12, 13, 14, or 15 months. In some embodiments, the compound is administered at least 1, 2, 3, 4, 5, 6, 7, 8, 9, 10, 11, 12, 13, 14, 15, 16, 17, 18, 19, 20, 21, 22, 23, 24, 25, 26, 27, 28, 29, 30, 31, 32, 33, 34, 35, 36, 37, 38, 39, 40, 41, 42, 43, 44, 45, 46, 47, 48, 49, 50, 51, 52, or 53 times over a period of at least 1, 2, 3, 4, 5, 6, 7, 8, 9, 10, 11, 12, 13, 14, 15, 16, 17, 18, 19, 20, 21, 22, 23, 24, 25, 26, 27, 28, 29, 30, 31, 32, 33, 34, 35, 36, 37, 38, 39, 40, 41, 42, 43, 44, 45, 46, 47, 48, 49, 50, 51, 52, 53, 54, 55, 56, 57, 58, 59, 60, 61, 62, 63, 64, 65, 66, 67, 68, 69, or 70 days. In some embodiments, the compound is administered at least 1, 2, 3, 4, 5, 6, 7, 8, 9, 10, 11, 12, 13, 14, 15, 16, 17, 18, 19, 20, 21, 22, 23, 24, 25, 26, 27, 28, 29, 30, 31, 32, 33, 34, 35, 36, 37, 38, 39, 40, 41, 42, 43, 44, 45, 46, 47, 48, 49, 50, 51, 52, or 53 times over a period of at least 1, 2, 3, 4, 5, 6, 7, 8, 9, 10, 11, 12, 13, 14, 15, 16, 17, 18, 19, 20, 21, 22, 23, 24, 25, 26, 27, 28, 29, 30, 31, 32, 33, 34, 35, 36, 37, 38, 39, 40, 41, 42, 43, 44, 45, 46, 47, 48, 49, 50, 51, 52, or 53 weeks. In some embodiments, the compound is administered at least 1, 2, 3, 4, 5, 6, 7, 8, 9, 10, 11, 12, 13, 14, 15, 16, 17, 18, 19, 20, 21, 22, 23, 24, 25, 26, 27, 28, 29, 30, 31, 32, 33, 34, 35, 36, 37, 38, 39, 40, 41, 42, 43, 44, 45, 46, 47, 48, 49, 50, 51, 52, or 53 times over a period of at least 1, 2, 3, 4, 5, 6, 7, 8, 9, 10, 11, 12, 13, 14, 15, 16, 17, 18, 19, 20, 21, 22, 23, 24, 25, 26, 27, 28, 29, 30, 31, 32, 33, 34, 35, 36, 37, 38, 39, 40, 41, 42, 43, 44, 45, 46, 47, 48, 49, 50, 51, 52, or 53 months. In some embodiments, the compound is administered at least once a week for a period of at least 1, 2, 3, 4, 5, 6, 7, 8, 9, 10, 11, 12, 13, 14, 15, 16, 17, 18, 19, 20, 21, 22, 23, 24, 25, 26, 27, 28, 29, 30, 31, 32, 33, 34, 35, 36, 37, 38, 39, 40, 41, 42, 43, 44, 45, 46, 47, 48, 49, 50, 51, 52, 53, 54, 55, 56, 57, 58, 59, 60, 61, 62, 63, 64, 65, 66, 67, 68, 69, or 70 weeks. In some embodiments, the compound is administered at least once a week for a period of at least 1, 2, 3, 4, 5, 6, 7, 8, 9, 10, 11, 12, 13, 14, 15, 16, 17, 18, 19, 20, 21, 22, 23, 24, 25, 26, 27, 28, 29, 30, 31, 32, 33, 34, 35, 36, 37, 38, 39, 40, 41, 42, 43, 44, 45, 46, 47, 48, 49, 50, 51, 52, 53, 54, 55, 56, 57, 58, 59, 60, 61, 62, 63, 64, 65, 66, 67, 68, 69, or 70 months. In some embodiments, the compound is administered at least twice a week for a period of at least 1, 2, 3, 4, 5, 6, 7, 8, 9, 10, 11, 12, 13, 14, 15, 16, 17, 18, 19, 20, 21, 22, 23, 24, 25, 26, 27, 28, 29, 30, 31, 32, 33, 34, 35, 36, 37, 38, 39, 40, 41, 42, 43, 44, 45, 46, 47, 48, 49, 50, 51, 52, 53, 54, 55, 56, 57, 58, 59, 60, 61, 62, 63, 64, 65, 66, 67, 68, 69, or 70 weeks. In some embodiments, the compound is administered at least twice a week for a period of at least 1, 2, 3, 4, 5, 6, 7, 8, 9, 10, 11, 12, 13, 14, 15, 16, 17, 18, 19, 20, 21, 22, 23, 24, 25, 26, 27, 28, 29, 30, 31, 32, 33, 34, 35, 36, 37, 38, 39, 40, 41, 42, 43, 44, 45, 46, 47, 48, 49, 50, 51, 52, 53, 54, 55, 56, 57, 58, 59, 60, 61, 62, 63, 64, 65, 66, 67, 68, 69, or 70 months. In some embodiments, the compound is administered at least once every two weeks for a period of at least 2, 3, 4, 5, 6, 7, 8, 9, 10, 11, 12, 13, 14, 15, 16, 17, 18, 19, 20, 21, 22, 23, 24, 25, 26, 27, 28, 29, 30, 31, 32, 33, 34, 35, 36, 37, 38, 39, 40, 41, 42, 43, 44, 45, 46, 47, 48, 49, 50, 51, 52, 53, 54, 55, 56, 57, 58, 59, 60, 61, 62, 63, 64, 65, 66, 67, 68, 69, or 70 weeks. In some embodiments, the compound is administered at least once every two weeks for a period of at least 2, 3, 4, 5, 6, 7, 8, 9, 10, 11, 12, 13, 14, 15, 16, 17, 18, 19, 20, 21, 22, 23, 24, 25, 26, 27, 28, 29, 30, 31, 32, 33, 34, 35, 36, 37, 38, 39, 40, 41, 42, 43, 44, 45, 46, 47, 48, 49, 50, 51, 52, 53, 54, 55, 56, 57, 58, 59, 60, 61, 62, 63, 64, 65, 66, 67, 68, 69, or 70 months. In some embodiments, the compound is administered at least once every four weeks for a period of at least 4, 5, 6, 7, 8, 9, 10, 11, 12, 13, 14, 15, 16, 17, 18, 19, 20, 21, 22, 23, 24, 25, 26, 27, 28, 29, 30, 31, 32, 33, 34, 35, 36, 37, 38, 39, 40, 41, 42, 43, 44, 45, 46, 47, 48, 49, 50, 51, 52, 53, 54, 55, 56, 57, 58, 59, 60, 61, 62, 63, 64, 65, 66, 67, 68, 69, or 70 weeks. In some embodiments, the compound is administered at least once every four weeks for a period of at least 4, 5, 6, 7, 8, 9, 10, 11, 12, 13, 14, 15, 16, 17, 18, 19, 20, 21, 22, 23, 24, 25, 26, 27, 28, 29, 30, 31, 32, 33, 34, 35, 36, 37, 38, 39, 40, 41, 42, 43, 44, 45, 46, 47, 48, 49, 50, 51, 52, 53, 54, 55, 56, 57, 58, 59, 60, 61, 62, 63, 64, 65, 66, 67, 68, 69, or 70 months.

[0424] The subject of the described methods may be a mammal, and it includes humans and non-human mammals. In some embodiments, the subject is a human, such as an adult human.

### Combination Therapies

[0425] Any of the methods disclosed herein may further comprise administering to the subject a liver disease treatment agent. Any of the compositions disclosed herein may further comprise a liver disease treatment agent. In some embodiments, the liver disease treatment agent is selected from a peroxisome proliferator-activator receptor (PPAR) agonist, farnesoid X receptor (FXR) agonist, lipid-altering agent, and incretin-based therapy. In some embodiments, the PPAR agonist is selected from a PPARα agonist, dual PPARα/δ agonist, PPARγ agonist, and dual PPARα/γ agonist. In some embodiments, the dual PPARα agonist is a fibrate. In some embodiments, the PPARα/δ agonist is elafibranor. In some embodiments, the PPARγ agonist is a thiazolidinedione (TZD). In some embodiments, TZD is pioglitazone. In some embodiments, the dual PPARα/γ agonist is saroglitazar. In some embodiments, the FXR agonist is obeticholic acis (OCA). In some embodiments, the lipid-altering agent is aramchol. In some embodiments, the incretin-based therapy is a glucagon-like peptide 1 (GLP-1) receptor agonist or dipeptidyl peptidase 4 (DPP-4) inhibitor. In some embodiments, the GLP-1 receptor agonist is exenatide or liraglutide. In some embodiments, the DPP-4 inhibitor is sitagliptin or vildapliptin. In some embodiments, the siNA and the liver disease treatment agent are administered concurrently. In some embodiments, the siNA and the liver disease treatment agent are administered sequentially. In some embodiments, the siNA is administered prior to administering the liver disease treatment agent. In some embodiments, the siNA is administered after administering the liver disease treatment agent. In some embodiments, the siNA and the liver disease treatment agent are in separate containers. In some embodiments, the siNA and the liver disease treatment agent are in the same container.

### EXAMPLES

[0426] The following examples are provided to illustrate the present disclosure. Those ordinarily skilled in the art will readily understand that known variations of the following methods, procedures, and/or materials can be used. These examples are provided for the purpose of further illustration and are not intended to be limitations on the disclosure.

[0427] Throughout the disclosure, including in the sequences, abbreviations and acronyms may be used with the following meanings unless otherwise indicated:

| Abbreviation(s) | Reagent |
|---|---|
| A | Adenosine |
| C | Cytidine |
| G | Guanosine |
| U | Uridine |
| fX | 2′-fluoro on X where X is A, C, G, or U |
| mX | 2′-O-methyl on X where X is A, C, G, or |
| | U |
| ps | phosphorothioate internucleoside linkage |
| v | vinyl phosphonate |
| EC50 | half-maximal effective concentration |
| GalNAc | N-acetylgalactosamine (including |
| | variations thereof, such as GalNAc4) |
| PD | pharmacodynamics |
| PK | pharmacokinetics |
| PNPLA3 | Patatin-like phospholipase domain- |
| | containing protein 3 gene, including |
| | variants thereof as described herein |
| RT-qPCR | reverse transcriptase-quantitative |
| | polymerase chain reaction |
| DMF | Dimethylformamide |
| AcSK | Acesulfame potassium |
| TBAI | Tetra-n-butylammonium iodide |
| H₂O | Water |
| EA/EtOAc | Ethyl acetate |
| Na₂SO₄ | Sodium sulfate |
| CDCl₃ | Deuterated chloroform |
| CH₃CN/ACN/MeCN | Acetonitrile |
| MeOH | Methanol |
| NaOH | Sodium hydroxide |
| Ar | Argon gas |
| HCl | Hydrochloric acid |
| i-Pr₂O | Diisopropyl ether |
| THF | Tetrahydrofuran |
| LiBr | Lithium bromide |
| DIEA/DIPEA | N,N-Diisopropylethylamine |
| Pd/C | Palladium metal on carbon support |
| N₂ | Nitrogen gas |
| H₂ | Hydrogen gas |
| CD₃CN | Deuterated acetonitrile |
| TBAF | Tetra-n-butylammonium fluoride |
| DCM/CH₂Cl₂ | Dichloromethane |
| MS | Molecular sieves |
| NaHCO₃ | Sodium bicarbonate |
| NH₄HCO₃ | Ammonium bicarbonate |
| iPrOH/iPr-OH/IPA | Isopropanol |
| TEA | Triethanolamine |
| PPh₃ | Triphenylphosphine |
| DIAD | Diisopropyl azodicarboxylate |
| EtOH | Ethanol |
| NH2NH2•H2O | Hydrazine monohydrate |
| DMSO-d₆ | Deuterated dimethyl sulfoxide |
| Py/Pyr | Pyridine |
| MsCl | Methanesulfonyl chloride |
| PE | Petroleum ether |
| CH₃COOH/AcOH | Acetic acid |
| SiO₂ | Silica/Silicone dioxide |
| I₂ | Iodine |
| Na₂S₂O₃ | Sodium thiosulfate |
| AgNO₃ | Silver nitrate |
| DMTCl/DMTrCl | 4,4′-dimethoxytrityl chloride |
| DTT | Dithiothreitol |
| LiOH•H₂O | Lithium hydroxide monohydrate |
| DCI | 1,l′-Carbonyldiimidazole |
| TEMPO | (2,2,6,6-Tetramethylpiperidin-1-yl)oxyl |
| DIB | Diisobutylene |
| SOCl₂ | Thionyl chloride |
| CD₃OD | Deuterated methanol |
| NaBD₄ | Sodium borodeuteride |
| TBSCl | Tert-butyldimethylsilyl chloride |
| Et3SiH | Triethylsilane |
| TFA | Trifluoroacetic acid |
| NH₃•H₂O/NH₃*H₂O | Ammonia |
| FA/HCOOH/HCO₂H | Formic acid |
| BTT | Benzyl-thio-tetrazole |
| DDTT | 3-[(Dimethylaminomethylene)amino]- |
| | 3H-1,2,4-dithiazole-5-thione |
| K₂CO₃ | Potassium carbonate |
| NaH₂PO₄ | Monosodium phosphate |
| NaBr | Sodium bromide |
| KSAc | Potassium thioacetate |
| LiAlH₄ | Lithium aluminium hydride |
| DMSO | Dimethyl sulfoxide |
| CEOP[N(iPr)₂]₂/ | 2-Cyanoethyl N,N- |
| CEP[N(iPr)₂]₂/CEP/CEPCl | diisopropylchlorophosphoramidite |
| (CD₃O)₂Mg | Deuterated magnesium methoxide or d6- |
| | magnesium methoxide |
| NH₄Cl | Ammonium chloride |
| ACN-d₃ | Deuterated acetonitrile |
| D₂O | Heavy water/deuterium oxide |
| PDC | Pyridinium dichromate |
| Ac₂O | Acetic anhydride |
| MeOD | Monodeuterated methanol |
| CH₃COOD | Monodeuteroacetic acid |
| DCA | Dichloroacetic acid |
| TES | 2-{[1,3-Dihydroxy-2- |
| | (hydroxymethyl)propan-2- |
| | yl]amino}ethane-1-sulfonic acid |
| DMAP | 4-Dimethylaminopyridine |
| TPSCl | Triphenylsilyl chloride |
| BzCl | Benzoyl chloride |
| DMTrSH | 4,4′-Dimethoxytrityl thiol |
| NaOMe | Sodium methoxide |
| EDCI | 1-Ethyl-3-(3- |
| | dimethylaminopropyl)carbodiimide |
| POM | Polyoxymethylene |
| KOH | Potassium hydroxide |
| NaCl | Sodium chloride |
| iBuCl | Isobutyryl chloride |
| DAIB | (Diacetoxyiodo)benzene |
| NaI | Sodium iodide |
| Boc | Tert-butyloxycarbonyl |
| TMG | Tetramethylguanidine |
| TMSCHN₂ | Trimethylsilyldiazomethane |
| IBX | 2-Iodoxybenzoic acid |
| PivCl | Pivaloyl chloride/chloromethyl pivalate |
| NaH | Sodium hydride |
| CD₃I | Iodomethane-d₃ |
| BSA | Bis(trimethylsilyl)acetamide |
| TMSOTf | Trimethylsilyl trifluoromethanesulfonate |
| CH₃NH₂ | Methylamine |
| DPC | 1,5-Diphenylcarbazide |
| TrtCl/TrCl | Trityl chloride |
| DAST | Diethylaminosulfur trifluoride |
| Tf-Cl/TfCl | Trifluoromethanesulfonyl chloride |
| Et₃N | Triethylamine |
| KOAc | Potassium acetate |
| DABCO | 1,4-Diazabicyclo[2.2.2]octane |
| NaOAc | Sodium acetate |
| n-BuLi | n-Butyl lithium |
| BF₃•OEt₂ | Boron trifluoride etherate |
| BCl₃ | Boron trichloride/trichloroborane |
| NaN₃ | Sodium azide |
| DBU | 1,8-Diazabicyclo[5.4.0]undec-7-ene |
| NH₄F | Ammonium fluoride |
| (COCl)₂ | Oxalyl dichloride |
| MeNH₂ | Methylamine |
| Rh₂(OAc)₄ | Rhodium (II) acetate |
| Boc₂O | Di-tert-butyl dicarbonate |
| PPTS | Pyridinium p-toluenesulfonate |
| Ms₂O | Methanesulfonic anhydride |
| NaBH₄ | Sodium borohydride |
| PhCO2K | Potassium benzoate |
| p-TsOH/TsOH | p-Toluenesulfonic acid |
| NH₃ | Ammonia |
| TBDPSCl | tert-Butyldiphenylsilyl chloride |
| NaIO₄ | Sodium periodate |
| BAIB | (Diacetoxyiodo)benzene |
| Pb(OAc)₄ | Lead (IV) tetraacetate |
| MgSO₄ | Magnesium sulfate |
| CO₂ | Carbon dioxide |
| H₂O₂ | Hydrogen peroxide |
| CaCO₃ | Calcium carbonate |
| DIBAL-H | Diisobutylaluminum hydride |
| CuSO₄ | Copper (II) sulfate |
| CH₃I | Iodomethane |
| Ag₂O | Silver oxide |
| SnCl₄ | Tin (IV) chloride |
| MMTrCl | 4-Methoxytrityl chloride |
| Et₃Si | Triethylsilane |
| NaNO₂ | Sodium nitrite |
| TMSCl | Trimethylsilyl chloride |
| PacCl | Phenoxyacetyl chloride |
| BOMCl | Benzyl chloromethyl ether |
| DCE | Ethylene dichloride |
| t-BuOH | T-butyl alcohol |
| P₂O₅ | Phosphorus pentoxide |
| ETT | 5-Ethylthio-1H-tetrazole |
| AMA | Ammonia methylamine |

### Example 1. siNA Synthesis

[0428] This example describes an exemplary method for synthesizing ds-siNAs.

[0429] The 2′-OMe phosphoramidite 5′-O-DMT-deoxy Adenosine (NH-Bz), 3′-O-(2-cyanoethyl-N,N-diisopropyl phosphoramidite, 5′-O-DMT-deoxy Guanosine (NH-ibu), 3′-O-(2-cyanoethyl-N,N-diisopropyl phosphoramidite, 5′-O-DMT-deoxy Cytosine (NH-Bz), 3′-O-(2-cyanoethyl-N,N-diisopropyl phosphoramidite, 5′-O-DMT-Uridine 3′-O-(2-cyanoethyl-N,N-diisopropyl phosphoramidite were purchased from Thermo Fisher Milwaukee WI, USA.

[chemical structure]

[0430] The 2′-F-5′-O-DMT-(NH-Bz) Adenosine-3′-O-(2-cyanoethyl-N,N-diisopropyl phosphoramidite, 2′-F-5′-O-DMT-(NH-ibu)-Guanosine, 3′-O-(2-cyanoethyl-N,N-diisopropyl phosphoramidite, 5′-O-DMT-(NH-Bz)-Cytosine, 2′-F-3′-O-(2-cyanoethyl-N,N-diisopropyl phosphoramidite, 5′-O-DMT-Uridine, 2′-F-3′-O-(2-cyanoethyl-N,N-diisopropyl phosphoramidite were purchased from Thermo Fisher Milwaukee WI, USA.

[chemical structure]

[0431] All the monomers were dried in vacuum desiccator with desiccants (P₂O₅, RT 24 h). The solid supports (CPG) attached to the nucleosides and universal supports were obtained from LGC and Chemgenes. The chemicals and solvents for post synthesis workflow were purchased from commercially available sources like VWR/Sigma and used without any purification or treatment. Solvent (Acetonitrile) and solutions (amidite and activator) were stored over molecular sieves during synthesis.

[0432] The oligonucleotides were synthesized on DNA/RNA Synthesizers (Expedite 8909 or ABI-394 or MM-48) using standard oligonucleotide phosphoramidite chemistry starting from the 3′ residue of the oligonucleotide preloaded on CPG support. An extended coupling of 0.1M solution of phosphoramidite in CH₃CN in the presence of 5-(ethylthio)-1H-tetrazole activator to a solid bound oligonucleotide followed by standard capping, oxidation and deprotection afforded modified oligonucleotides. The 0.1M I₂, THF: Pyridine; Water-7:2:1 was used as oxidizing agent while DDTT ((dimethylamino-methylidene)amino)-3H-1,2,4-dithiazaoline-3-thione was used as the sulfur-transfer agent for the synthesis of oligoribonucleotide phosphorothioates. The stepwise coupling efficiency of all modified phosphoramidites was more than 98%.

| Reagents | Detailed Description |
|---|---|
| Deblock Solution | 3% Dichloroacetic acid (DCA) in Dichloro- |
| | methane |
| Amidite Concentration | 0.1M in Anhydrous Acetonitrile |
| Activator | 0.25M Ethyl-thio-Tetrazole (ETT) |
| Cap-A solution | Acetic anhydride in Pyridine/THF |
| Cap-B Solution | 16% 1-Methylimidazole in THF |
| Oxidizing Solution | 0.02M I₂, THF:Pyridine; Water-7:2:1 |
| Sulfurizing Solution | 0.2M DDTT in Pyridine/Acetonitrile 1:1 |

### Cleavage and Deprotection:

[0433] Deprotection and cleavage from the solid support was achieved with mixture of ammonia methylamine (1:1, AMA) for 15 min at 65° C. When the universal linker was used, the deprotection was left for 90 min at 65° C. or solid supports were heated with aqueous ammonia (28%) solution at 55° C. for 8-16 h to deprotect the base labile protecting groups.

Quantitation of Crude siNA

[0434] Samples were dissolved in deionized water (1.0 mL) and quantitated as follows: blanking was first performed with water alone (2 ul) on Thermo Scientific™ Nanodrop UV spectrophotometer or BioTek™ Epoch™ plate reader then oligo sample reading was obtained at 260 nm. The crude material is dried down and stored at −20° C.

### Crude HPLC/LC-MS Analysis

[0435] The 0.1 OD of the crude samples were analyzed by HPLC and LC-MS. After confirming the crude LC-MS data then purification step was performed if needed based on the purity.

### HPLC Purification

[0436] The unconjugated and GalNAc modified oligonucleotides were purified by anion-exchange HPLC. The buffers were 20 mM sodium phosphate in 10% CH₃CN, pH 8.5 (buffer A) and 20 mM sodium phosphate in 10% CH₃CN, 1.0 M NaBr, pH 8.5 (buffer B). Fractions containing full-length oligonucleotides were pooled.

Desalting of Purified siNA

[0437] The purified dry siNA was then desalted using Sephadex G-25 M (Amersham Biosciences). The cartridge was conditioned with 10 mL of deionized water thrice. Finally, the purified siNA dissolved thoroughly in 2.5 mL RNAse free water was applied to the cartridge drop wise. The salt free siNA was eluted with 3.5 mL deionized water directly into a screw cap vial. Alternatively, some unconjugated siNA was deslated using Pall AcroPrep™ 3K MWCO desalting plates.

### IEX HPLC and Electrospray LC/MS Analysis

[0438] Approximately 0.10 OD of siNA was dissolved in water and then pipetted into HPLC autosampler vials for IEX-HPLC and LC/MS analysis. Analytical HPLC and ES LC-MS confirmed the identity and purity of the compounds.

### Duplex Preparation:

[0439] Single strand oligonucleotides (Sense and Antisense strands) were annealed (1:1 by molar equivalents, heat at 90° C. for 2 min followed by gradual cooling at room temperature) to give the duplex ds-siNA. The final compounds were analyzed on size exclusion chromatography (SEC).

### Example 2: Synthesis of 5′ End Cap Monomer

[chemical structure]

[chemical structure]

### Example 2 Monomer Synthesis Scheme

[0440] Preparation of (2): To a solution of 1 (15 g, 57.90 mmol) in DMF (150 mL) were added AcSK (11.24 g, 98.43 mmol) and TBAI (1.07 g, 2.89 mmol), and the mixture was stirred at 25° C. for 12 h. Upon completion as monitored by LCMS, the mixture was diluted with H₂O (10 mL) and extracted with EA (200 mL*3). The combined organic layers were washed with brine (200 mL*3), dried over anhydrous Na₂SO₄, filtered and concentrated under reduced pressure to give 2 (14.5 g, 96.52% yield, 98% purity) as a colorless oil. ESI-LCMS: 254.28 [M+H]⁺; ¹H NMR (400 MHz, CDCl₃) δ=4.78-4.65 (m, 2H), 3.19 (d, J=14.1 Hz, 2H), 2.38 (s, 3H), 1.32 (t, J=6.7 Hz, 12H); ³¹P NMR (162 MHz, CDCl₃) δ=20.59.

[0441] Preparation of (3): To a solution of 2 (14.5 g, 57.02 mmol) in CH₃CN (50 mL) and MeOH (25 mL) was added NaOH (3 M, 28.51 mL), and the mixture was stirred at 25° C. for 12 h under Ar. Upon completion as monitored by TLC, the reaction mixture was concentrated under reduced pressure to remove CH₃CN and CH₃OH. The residue was diluted with water (50 mL) and adjust pH=7 by 6M HCl, and the mixture was extracted with EA (50 mL*3). The combined organic layers were washed with brine (50 mL*3), dried over anhydrous Na₂SO₄, filtered and concentrated under reduced pressure to give 3 (12.1 g, crude) as a colorless oil.

[0442] Preparation of (4): To a solution of 3 (12.1 g, 57.01 mmol) in CH₃CN (25 mL) and MeOH (25 mL) was added A (14.77 g, 57.01 mmol) dropwise at 25° C., and the mixture was stirred at 25° C. under Ar for 12 h. Upon completion as monitored by LCMS, the reaction mixture was concentrated under reduced pressure to give 4 (19.5 g, 78.85% yield) as a colorless oil. ¹H NMR (400 MHz, CDCl₃) δ=4.80-4.66 (m, 4H), 2.93 (d, J=11.3 Hz, 4H), 1.31 (dd, J=3.9, 6.1 Hz, 24H); ³¹P NMR (162 MHz, CDCl₃) δ=22.18.

[0443] Preparation of (5): To a solution of 4 (19.5 g, 49.95 mmol) in MeOH (100 mL) and H₂O (100 mL) was added Oxone (61.41 g, 99.89 mmol) at 25° C. in portions, and the mixture was stirred at 25° C. for 12 h under Ar. Upon completion as monitored by LCMS, the reaction mixture was filtered, and the filtrate was concentrated under reduced pressure to remove MeOH. The residue was extracted with EA (50 mL*3). The combined organic layers were washed with brine (50 mL*3), dried over anhydrous Na₂SO₄, filtered and concentrated under reduced pressure to give a residue. The crude product was triturated with i-Pr₂O and n-Hexane (1:2, 100 mL) at 25° C. for 30 min to give 5 (15.6 g, 73.94% yield) as a white solid. ¹H NMR (400 MHz, CDCl₃) δ=4.92-4.76 (m, 4H), 4.09 (d, J=16.1 Hz, 4H), 1.37 (dd, J=3.5, 6.3 Hz, 24H); ³¹P NMR (162 MHz, CDCl₃) δ=10.17.

[0444] Preparation of (7): To a mixture of 5 (6.84 g, 16.20 mmol) in THF (20 mL) was added LiBr (937.67 mg, 10.80 mmol) until dissolved, followed by DIEA (1.40 g, 10.80 mmol, 1.88 mL) under argon at 15° C. The mixture was stirred at 15° C. for 15 min. 6 (4 g, 10.80 mmol) were added. The mixture was stirred at 15° C. for 3 h. Upon completion as monitored by LCMS, the reaction mixture was quenched by addition of H₂O (40 mL) and extracted with EA (40 mL*3). The combined organic layers were washed with brine (100 mL), dried over Na₂SO₄, filtered and concentrated under reduced pressure to give a residue. The residue was purified by flash reverse-phase chromatography (120 g C-18 Column, Eluent of 0˜60% ACN/H₂O gradient @ 80 mL/min) to give 7 (5.7 g, 61.95% yield) as a colorless oil. ESI-LCMS: 611.2 [M+H]⁺; ¹H NMR (400 MHz, CDCl₃); δ=9.26 (s, 1H), 7.50 (d, J=8.1 Hz, 1H), 7.01 (s, 2H), 5.95 (d, J=2.7 Hz, 1H), 5.80 (dd, J=2.1, 8.2 Hz, 1H), 4.89-4.72 (m, 2H), 4.66 (d, J=7.2 Hz, 1H), 4.09-4.04 (m, 1H), 3.77 (dd, J=2.7, 4.9 Hz, 1H), 3.62 (d, J=3.1 Hz, 1H), 3.58 (d, J=3.1 Hz, 1H), 3.52 (s, 3H), 1.36 (td, J=1.7, 6.1 Hz, 12H), 0.92 (s, 9H), 0.12 (s, 6H); ³¹P NMR (162 MHz, CDCl₃) δ=9.02

[0445] Preparation of (8): To a mixture of 7 (5.4 g, 8.84 mmol) in THF (80 mL) was added Pd/C (5.4 g, 10% purity) under N₂. The suspension was degassed under vacuum and purged with H₂ several times. The mixture was stirred under H₂ (15 psi) at 20° C. for 1 hr. Upon completion as monitored by LCMS, the reaction mixture was filtered, and the filtrate was concentrated to give 8 (5.12 g, 94.5% yield) as a white solid. ESI-LCMS: 613.3 [M+H]⁺; ¹H NMR (400 MHz, CD₃CN) δ=9.31 (s, 1H), 7.37 (d, J=8.0 Hz, 1H), 5.80-5.69 (m, 2H), 4.87-4.75 (m, 2H), 4.11-4.00 (m, 1H), 3.93-3.85 (m, 1H), 3.80-3.74 (m, 1H), 3.66-3.60 (m, 1H), 3.57-3.52 (m, 1H), 3.49 (s, 3H), 3.46-3.38 (m, 1H), 2.35-2.24 (m, 1H), 2.16-2.03 (m, 1H), 1.89-1.80 (m, 1H), 1.37-1.34 (m, 12H), 0.90 (s, 9H), 0.09 (s, 6H); ³¹P NMR (162 MHz, CD₃CN) δ=9.41.

[0446] Preparation of (9): To a solution of 8 (4.4 g, 7.18 mmol) in THF (7.2 mL) was added TBAF (1 M, 7.18 mL), and the mixture was stirred at 20° C. for 1 hr. Upon completion as monitored by LCMS, the reaction mixture was diluted with H₂O (50 mL) and extracted with EA (50 mL*4). The combined organic layers were washed with brine (50 mL), dried over Na₂SO₄, filtered and concentrated under reduced pressure to give a residue. The residue was purified by flash silica gel chromatography (ISCO®; 40 g SepaFlash® Silica Flash Column, Eluent of 0˜5%, MeOH/DCM gradient @ 40 mL/min) to give 9 (3.2 g, 88.50% yield) as a white solid. ESI-LCMS: 499.2 [M+H]⁺¹; ¹H NMR (400 MHz, CD₃CN) δ=9.21 (s, 1H), 7.36 (d, J=8.3 Hz, 1H), 5.81-5.72 (m, 2H), 4.88-4.74 (m, 2H), 3.99-3.87 (m, 2H), 3.84 (dd, J=1.9, 5.4 Hz, 1H), 3.66-3.47 (m, 7H), 2.98 (s, 1H), 2.44-2.15 (m, 2H), 1.36 (d, J=6.0 Hz, 12H); ³¹P NMR (162 MHz, CD₃CN) δ=9.48.

[0447] Preparation of (Example 2 monomer): To a mixture of 9 (3.4 g, 6.82 mmol, 1 eq) and 4A MS (3.4 g) in MeCN (50 mL) was added P1 (2.67 g, 8.87 mmol, 2.82 mL, 1.3 eq) at 0° C., followed by addition of 1H-imidazole-4,5-dicarbonitrile (886.05 mg, 7.50 mmol) at 0° C. The mixture was stirred at 20° C. for 2 h. Upon completion as monitored by LCMS, the reaction mixture was quenched by addition of saturated aq. NaHCO₃ (50 mL) and diluted with DCM (100 mL). The organic layer was washed with saturated aq. NaHCO₃ (50 mL*2), dried over Na₂SO₄, filtered and concentrated under reduced pressure to give a residue. The residue was purified by prep-HPLC: column: YMC-Triart Prep C18 250*50 mm*10 um; mobile phase: [water (10 mM NH₄HCO₃)-ACN]; B %: 15% to give a impure product. The impure product was further purified by a flash silica gel column (0% to 5% i-PrOH in DCM with 0.5% TEA) to give Example 2 monomer (2.1 g, 43.18% yield) as a white solid. ESI-LCMS: 721.2 [M+Na]⁺; H NMR (400 MHz, CD₃CN) δ=9.29 (s, 1H), 7.45 (d, J=8.1 Hz, 1H), 5.81 (d, J=4.2 Hz, 1H), 5.65 (d, J=8.1 Hz, 1H), 4.79-4.67 (m, 2H), 4.26-4.05 (m, 2H), 4.00-3.94 (m, 1H), 3.89-3.63 (m, 6H), 3.53-3.33 (m, 5H), 2.77-2.61 (m, 2H), 2.31-2.21 (m, 1H), 2.16-2.07 (m, 1H), 1.33-1.28 (m, 12H), 1.22-1.16 (m, 1H), 1.22-1.16 (m, 11H); ³¹P NMR (162 MHz, CD₃CN) δ=149.89, 149.78, 10.07, 10.02.

### Example 3. Synthesis of 5′ End Cap Monomer

[chemical structure]

### Example 3 Monomer Synthesis Scheme

[0448] Preparation of (2): To a solution of 1 (5 g, 13.42 mmol) in DMF (50 mL) were added PPh₃ (4.58 g, 17.45 mmol) and 2-hydroxyisoindoline-1,3-dione (2.85 g, 17.45 mmol), followed by a solution of DIAD (4.07 g, 20.13 mmol, 3.91 mL) in DMF (10 mL) dropwise at 15° C. The resulting solution was stirred at 15° C. for 18 hr. The reaction mixture was then diluted with DCM (50 mL), washed with H₂O (60 mL*3) and brine (30 mL), dried over Na₂SO₄, filtered and evaporated to give a residue. The residue was then triturated with EtOH (55 mL) for 30 min, and the collected white powder was washed with EtOH (10 mL*2) and dried to give 2 (12.2 g, 85.16% yield) as a white powder (the reaction was set up in two batches and combined) ESI-LCMS: 518.1 [M+H]⁺.

[0449] Preparation of (3): 2 (6 g, 11.59 mmol) was suspended in MeOH (50 mL), and then NH₂NH₂·H₂O (3.48 g, 34.74 mmol, 3.38 mL, 50% purity) was added dropwise at 20° C. The reaction mixture was stirred at 20° C. for 4 hr. Upon completion, the reaction mixture was diluted with EA (20 mL) and washed with NaHCO₃ (10 mL*2) and brine (10 mL). The combined organic layers were then dried over Na₂SO₄, filtered and evaporated to give 3 (8.3 g, 92.5% yield) as a white powder. (The reaction was set up in two batches and combined). ESI-LCMS: 388.0 [M+H]⁺; ¹H NMR (400 MHz, DMSO-d₆) δ=11.39 (br s, 1H), 7.72 (d, J=8.1 Hz, 1H), 6.24-6.09 (m, 2H), 5.80 (d, J=4.9 Hz, 1H), 5.67 (d, J=8.1 Hz, 1H), 4.26 (t, J=4.9 Hz, 1H), 4.03-3.89 (m, 1H), 3.87-3.66 (m, 3H), 3.33 (s, 3H), 0.88 (s, 9H), 0.09 (d, J=1.3 Hz, 6H)

[0450] Preparation of (4): To a solution of 3 (7 g, 18.06 mmol) and Py (1.43 g, 18.06 mmol, 1.46 mL) in DCM (130 mL) was added a solution of MsCl (2.48 g, 21.68 mmol, 1.68 mL) in DCM (50 mL) dropwise at −78° C. under N₂. The reaction mixture was allowed to warm to 15° C. in 30 min and stirred at 15° C. for 3 h. The reaction mixture was quenched by addition of ice-water (70 mL) at 0° C., and then extracted with DCM (50 mL*3). The combined organic layers were washed with saturated aq. NaHCO₃ (50 mL) and brine (30 mL), dried over Na₂SO₄, filtered and concentrated under reduced pressure to give a residue. The residue was purified by flash silica gel chromatography (ISCOR; 30 g SepaFlash® Silica Flash Column, Eluent of 0˜20% i-PrOH/DCM gradient @ 30 mL/min to give 4 (6.9 g, 77.94% yield) as a white solid. ESI-LCMS: 466.1 [M+H]⁺; ¹H NMR (400 MHz, DMSO-d₆) δ=11.41 (br s, 1H), 10.15 (s, 1H), 7.69 (d, J=8.1 Hz, 1H), 5.80 (d, J=4.4 Hz, 1H), 5.65 (d, J=8.1 Hz, 1H), 4.24 (t, J=5.2 Hz, 1H), 4.16-3.98 (m, 3H), 3.87 (t, J=4.8 Hz, 1H), 3.00 (s, 3H), 2.07 (s, 3H), 0.88 (s, 9H), 0.10 (d, J=1.5 Hz, 6H)

[0451] Preparation of (5): To a solution of 4 (6.9 g, 14.82 mmol) in THF (70 mL) was added TBAF (1 M, 16.30 mL) at 15° C. The reaction mixture was stirred at 15° C. for 18 hr, and then evaporated to give a residue. The residue was purified by flash silica gel chromatography (ISCO®; 24 g SepaFlash® Silica Flash Column, Eluent of 0˜9% MeOH/Ethyl acetate gradient @ 30 mL/min) to give 5 (1.8 g, 50.8% yield) as a white solid. ESI-LCMS: 352.0 [M+H]⁺; ¹H NMR (400 MHz, DMSO-d₆) δ=11.40 (s, 1H), 10.13 (s, 1H), 7.66 (d, J=8.1 Hz, 1H), 5.83 (d, J=4.9 Hz, 1H), 5.65 (dd, J=1.8, 8.1 Hz, 1H), 5.36 (d, J=6.2 Hz, 1H), 4.13-4.00 (m, 4H), 3.82 (t, J=5.1 Hz, 1H), 3.36 (s, 3H), 3.00 (s, 3H)

[0452] Preparation of (Example 3 monomer): To a mixture of 5 (3 g, 8.54 mmol) and DIEA (2.21 g, 17.08 mmol, 2.97 mL) in ACN (90 mL) was added CEPCl (3.03 g, 12.81 mmol) dropwise at 15° C. The reaction mixture was stirred at 15° C. for 5 h. Upon completion, the reaction mixture was diluted with EA (40 mL) and quenched with 5% NaHCO₃ (20 mL). The organic layer was washed with brine (30 mL), dried over Na₂SO₄, filtered and evaporated to give a residue. The residue was purified by flash silica gel chromatography (ISCO®; 12 g SepaFlash® Silica Flash Column, Eluent of 0˜15% i-PrOH/(DCM with 2% TEA) gradient @ 20 mL/min) to Example 3 monomer (2.1 g, 43.93% yield) as a white solid. ESI-LCMS: 552.3 [M+H]⁺; ¹H NMR (400 MHz, CD₃CN) δ=8.78 (br s, 1H), 7.57 (dd, J=4.6, 8.2 Hz, 1H), 5.97-5.80 (m, 1H), 5.67 (d, J=8.3 Hz, 1H), 4.46-4.11 (m, 4H), 3.95-3.58 (m, 5H), 3.44 (d, J=16.3 Hz, 3H), 3.02 (d, J=7.5 Hz, 3H), 2.73-2.59 (m, 2H), 1.23-1.15 (m, 12H); ³¹P NMR (162 MHz, CD₃CN) δ=150.30, 150.10

### Example 4: Synthesis of 5′ End Cap Monomer

[chemical structure]

### Example 4 Monomer Synthesis Scheme

[0453] Preparation of (2): To the solution of 1 (5 g, 12.90 mmol) and TEA (1.57 g, 15.48 mmol, 2.16 mL) in DCM (50 mL) was added P-4 (2.24 g, 15.48 mmol, 1.67 mL) in DCM (10 mL) dropwise at 15° C. under N₂. The reaction mixture was stirred at 15° C. for 3 h. Upon completion as monitored by LCMS and TLC (PE:EtOAc=0:1), the reaction mixture was concentrated to dryness, diluted with H₂O (20 mL), and extracted with EA (50 mL*3). The combined organic layers were washed with brine (30 mL*3), dried over anhydrous Na₂SO₄, filtered, and the filtrate was concentrated under reduced pressure to give a residue. The residue was purified by flash silica gel chromatography (ISCO®; 40 g SepaFlash® Silica Flash Column, Eluent of 0˜95% Ethyl acetate/Petroleum ether gradient @ 60 mL/min) to give 2 (5.3 g, 71.3% yield) as a white solid. ESI-LCMS: 496.1 [M+H]⁺: H NMR (400 MHz, CDCl₃) δ=0.10 (d, J=4.02 Hz, 6H) 0.91 (s, 9H) 3.42-3.54 (m, 3H) 3.65-3.70 (m, 1H) 3.76-3.89 (m, 6H) 4.00 (dd, J=10.92, 2.89 Hz, 1H) 4.08-4.13 (m, 1H) 4.15-4.23 (m, 2H) 5.73 (dd, J=8.28, 2.01 Hz, 1H) 5.84 (d, J=2.76 Hz, 1H) 6.86 (d, J=15.81 Hz, 1H) 7.72 (d, J=8.03 Hz, 1H) 9.10 (s, 1H); ³¹P NMR (162 MHz, CD₃CN) δ=9.65

[0454] Preparation of (3): To a solution of 2 (8.3 g, 16.75 mmol) in THF (50 mL) were added TBAF (1 M, 16.75 mL) and CH₃COOH (1.01 g, 16.75 mmol, 957.95 uL). The mixture was stirred at 20° C. for 12 hr. Upon completion as monitored by LCMS, the reaction mixture was concentrated under reduced pressure. The residue was purified by column chromatography (SiO₂, PE:EA=0˜100%; MeOH/EA=0˜10%) to give 3 (5 g, 77.51% yield) as a white solid. ESI-LCMS: 382.1 [M+H]⁺; ¹H NMR (400 MHz, CDCl₃) δ=3.35 (s, 3H) 3.65 (br d, J=2.76 Hz, 3H) 3.68 (d, J=2.76 Hz, 3H) 3.77 (t, J=5.08 Hz, 1H) 3.84-4.10 (m, 4H) 5.33 (br d, J=5.52 Hz, 1H) 5.62 (d, J=7.77 Hz, 1H) 5.83 (d, J=4.94 Hz, 1H) 7.69 (d, J=7.71 Hz, 1H) 9.08 (d, J=16.81 Hz, 1H) 11.39 (br s, 1H); ³¹P NMR (162 MHz, CD₃CN) δ=15.41

[0455] Preparation of (Example 4 monomer): To a solution of 3 (2 g, 5.25 mmol) and DIPEA (2.03 g, 15.74 mmol, 2.74 mL, 3 eq) in MeCN (21 mL) and pyridine (7 mL) was added CEOP[N(iPr)₂]₂/CEP[N(iPr)₂]₂/CEP/CEPCl (1.86 g, 7.87 mmol) dropwise at 20° C., and the mixture was stirred at 20° C. for 3 hr. Upon completion as monitored by LCMS, the reaction mixture was diluted with water (20 mL) and extracted with EA (50 mL). The combined organic layers were washed with brine (30 mL), dried over anhydrous Na₂SO₄, filtered, and the filtrate was concentrated under reduced pressure to give a residue. The residue was purified by flash silica gel chromatography (ISCO®; 25 g SepaFlash® Silica Flash Column, Eluent of 0˜45% (Ethyl acetate:EtOH=4:1)/Petroleum ether gradient) to give Example 4 monomer (1.2 g, 38.2% yield) as a white solid. ESI-LCMS: 604.1 [M+H]⁺. ¹H NMR (400 MHz, CD₃CN) δ=1.12-1.24 (m, 12H) 2.61-2.77 (m, 2H) 3.43 (d, J=17.64 Hz, 3H) 3.59-3.69 (m, 2H) 3.71-3.78 (m, 6H) 3.79-4.14 (m, 5H) 4.16-4.28 (m, 1H) 4.29-4.42 (m, 1H) 5.59-5.72 (m, 1H) 5.89 (t, J=4.53 Hz, 1H) 7.48 (br d, J=12.76 Hz, 1H) 7.62-7.74 (m, 1H) 9.26 (br s, 1H); ³¹P NMR (162 MHz, CD₃CN) δ=150.57, 149.96, 9.87

### Example 5: Synthesis of 5′ End Cap Monomer

[chemical structure]

### Example 5 Monomer Synthesis Scheme

[0456] Preparation of (2): To a solution of 1 (30 g, 101.07 mmol, 87% purity) in CH₃CN (1.2 L) and Py (60 mL) were added I₂ (33.35 g, 131.40 mmol, 26.47 mL) and PPh₃ (37.11 g, 141.50 mmol) in one portion at 10° C. The reaction was stirred at 25° C. for 48 h. Upon completion, the mixture was diluted with saturated aq. Na₂S₂O₃ (300 mL) and saturated aq. NaHCO₃ (300 mL), concentrated to remove CH₃CN, and extracted with EtOAc (300 mL*3). The combined organic layers were washed with brine (300 mL), dried over Na₂SO₄, filtered and concentrated under reduced pressure to give a residue. The residue was purified by flash silica gel chromatography (ISCO®; 330 g SepaFlash® Silica Flash Column, Eluent of 0-60% Methanol/Dichloromethane gradient @ 100 mL/min) to give 2 (28.2 g, 72% yield) as a brown solid. ESI-LCMS: 369.1 [M+H]⁺: H NMR (400 MHz, DMSO-d₆) δ=11.43 (s, 1H), 7.68 (d, J=8.1 Hz, 1H), 5.86 (d, J=5.5 Hz, 1H), 5.69 (d, J=8.1 Hz, 1H), 5.46 (d, J=6.0 Hz, 1H), 4.08-3.96 (m, 2H), 3.90-3.81 (m, 1H), 3.60-3.51 (m, 1H), 3.40 (dd, J=6.9, 10.6 Hz, 1H), 3.34 (s, 3H).

[0457] Preparation of (3): To the solution of 2 (12 g, 32.6 mmol) in DCM (150 mL) were added AgNO₃ (11.07 g, 65.20 mmol), 2,4,6-trimethylpyridine (11.85 g, 97.79 mmol, 12.92 mL), and DMTCl (22.09 g, 65.20 mmol) at 10° C., and the reaction mixture was stirred at 10° C. for 16 hr. Upon completion, the mixture was filtered and the filtrate was concentrated under reduced pressure. The residue was purified by flash silica gel chromatography (ISCO®; 120 g SepaFlash® Silica Flash Column, Eluent of 0˜50% Ethyl acetate/Petroleum ether gradient @ 60 mL/min) to give 3 (17 g, 70.78% yield) as a yellow solid. ESI-LCMS: 693.1 [M+Na]⁺¹; H NMR (400 MHz, DMSO-d₆) δ=11.46 (s, 1H), 7.60 (d, J=8.4 Hz, 1H), 7.49 (d, J=7.2 Hz, 2H), 7.40-7.30 (m, 6H), 7.29-7.23 (m, 1H), 6.93 (d, J=8.8 Hz, 4H), 5.97 (d, J=6.0 Hz, 1H), 5.69 (d, J=8.0 Hz, 1H), 4.05-4.02 (m, 1H), 3.75 (d, J=1.2 Hz, 6H), 3.57 (t, J=5.6 Hz, 1H), 3.27 (s, 4H), 3.06 (t, J=10.4 Hz, 1H), 2.98-2.89 (m, 1H).

[0458] Preparation of (4): To a solution of 3 (17 g, 25.35 mmol) in DMF (200 mL) was added AcSK (11.58 g, 101.42 mmol) at 25° C., and the reaction was stirred at 60° C. for 2 hr. The mixture was diluted with H₂O (600 mL) and extracted with EtOAc (300 mL*4). The combined organic layers were washed with brine (300 mL), dried over Na₂SO₄, filtered, and concentrated under reduced pressure to give 4 (15.6 g, crude) as a brown solid, which was used directly without further purification. ESI-LCMS: 641.3 [M+H]⁺.

[0459] Preparation of (5): To a solution of 4 (15.6 g, 25.21 mmol) in CH₃CN (200 mL) were added DTT (11.67 g, 75.64 mmol, 11.22 mL) and LiOH·H₂O (1.06 g, 25.21 mmol) at 10° C. under Ar. The reaction was stirred at 10° C. for 1 hr. The mixture was concentrated under reduced pressure to remove CH₃CN, and the residue was diluted with H₂O (400 mL) and extracted with EtOAc (200 mL*3). The combined organic layers were washed with brine (300 mL), dried over Na₂SO₄, filtered and concentrated under reduced pressure to give a residue. The residue was purified by flash silica gel chromatography (ISCO®; 220 g SepaFlash® Silica Flash Column, Eluent of 0˜60% Ethyl acetate/Petroleum ether gradient @ 100 mL/min) to give 5 (8.6 g, 56.78% yield) as a white solid. ESI-LCMS: 599.3 [M+Na]⁺; ¹H NMR (400 MHz, DMSO-d₆) δ=8.79 (s, 1H), 7.61 (d, J=8.0 Hz, 1H), 7.56-7.46 (m, 2H), 7.45-7.37 (m, 4H), 7.36-7.27 (m, 3H), 6.85 (dd, J=2.8, 8.8 Hz, 4H), 5.85 (d, J=1.3 Hz, 1H), 5.68 (dd, J=2.0, 8.2 Hz, 1H), 4.33-4.29 (m, 1H), 3.91 (dd, J=4.8, 8.2 Hz, 1H), 3.81 (d, J=1.6 Hz, 6H), 3.33 (s, 3H), 2.85-2.80 (m, 1H), 2.67-2.55 (m, 2H), 1.11 (t, J=8.8 Hz, 1H).

[0460] Preparation of (Example 5 monomer): To a solution of 5 (6 g, 10.40 mmol) in DCM (120 mL) were added P1 (4.08 g, 13.53 mmol, 4.30 mL) and DCI (1.35 g, 11.45 mmol) in one portion at 10° C. under Ar. The reaction was stirred at 10° C. for 2 hr. The reaction mixture was diluted with saturated aq. NaHCO₃ (50 mL) and extracted with DCM (20 mL*3). The combined organic layers were washed with brine (30 mL), dried over Na₂SO₄, filtered and concentrated under reduced pressure to give a residue. The residue was purified by prep-HPLC (column: YMC-Triart Prep C18 250*50 mm*10 um; mobile phase: [water (10 mM NH₄HCO₃)-ACN]; B %: 35%-81%, 20 min) to give Example 5 monomer (3.54 g, 43.36% yield) as a yellow solid. ESI-LCMS: 776.4 [M+H]⁺; ¹H NMR (400 MHz, DMSO-d₆) δ=7.65-7.38 (m, 7H), 7.37-7.22 (m, 3H), 6.90 (d, J=8.4 Hz, 4H), 5.92 (s, 1H), 5.66 (t, J=8.2 Hz, 1H), 4.13 (d, J=4.0 Hz, 1H), 4.00-3.88 (m, 1H), 3.87-3.59 (m, 10H), 3.33 (d, J=5.8 Hz, 3H), 3.12-2.94 (m, 1H), 2.78-2.60 (m, 3H), 2.55-2.48 (m, 1H), 1.36-0.98 (m, 12H); ³¹P NMR (162 MHz, DMSO-d₆) δ=162.69.

### Example 6: Synthesis of 5′ End Cap Monomer

[chemical structure]

[chemical structure]

### Example 6 Monomer Synthesis Scheme

[0461] Preparation of (2): To a solution of 1 (22.6 g, 45.23 mmol) in DCM (500 mL) and H₂O (125 mL) were added TEMPO (6.40 g, 40.71 mmol) and DIB (29.14 g, 90.47 mmol) at 0° C. The mixture was stirred at 20° C. for 20 h. Upon completion as monitored by LCMS, saturated aq. NaHCO₃ was added to the mixture to adjust pH >8. The mixture was diluted with H₂O (200 mL) and washed with DCM (100 mL*3). The aqueous layer was collected, adjusted to pH <5 by HCl (4M), and extracted with DCM (200 mL*3). The combined organic layers were washed with brine (300 mL), dried over Na₂SO₄, filtered, and concentrated under reduced pressure to give 2 (17.5 g, 68.55% yield) as a yellow solid. ESI-LCMS: 514.2 [M+H]⁺; 1H NMR (400 MHz, DMSO-d₆) δ=11.27 (s, 1H), 8.86 (s, 1H), 8.78 (s, 1H), 8.06 (d, J=7.5 Hz, 2H), 7.68-7.62 (m, 1H), 7.59-7.52 (m, 2H), 6.28 (d, J=6.8 Hz, 1H), 4.82-4.76 (m, 1H), 4.54 (dd, J=4.1, 6.7 Hz, 1H), 4.48 (d, J=1.8 Hz, 1H), 3.32 (s, 3H), 0.94 (s, 9H), 0.18 (d, J=4.8 Hz, 6H).

[0462] Preparation of (3): To a solution of 2 (9.3 g, 18.11 mmol) in MeOH (20 mL) was added SOCl₂ (3.23 g, 27.16 mmol, 1.97 mL) dropwise at 0° C. The mixture was stirred at 20° C. for 0.5 hr. Upon completion as monitored by LCMS, the reaction mixture was quenched by addition of saturated aq. NaHCO₃ (80 mL) and concentrated under reduced pressure to remove MeOH. The aqueous layer was extracted with DCM (80 mL*3). The combined organic layers were washed with brine (200 mL), dried over Na₂SO₄, filtered and concentrated under reduced pressure to give a residue. The residue was purified by flash silica gel chromatography (ISCOR; 120 g SepaFlash® Silica Flash Column, Eluent of 0˜5%, MeOH/DCM gradient @ 85 mL/min) to give 3 (5.8 g, 60% yield) as a yellow solid. ESI-LCMS: 528.3 [M+H]⁺; ¹H NMR (400 MHz, DMSO-d₆) δ=11.28 (s, 1H), 8.79 (d, J=7.3 Hz, 2H), 8.06 (d, J=7.5 Hz, 2H), 7.68-7.62 (m, 1H), 7.60-7.53 (m, 2H), 6.28 (d, J=6.6 Hz, 1H), 4.87 (dd, J=2.4, 4.0 Hz, 1H), 4.61 (dd, J=4.3, 6.5 Hz, 1H), 4.57 (d, J=2.2 Hz, 1H), 3.75 (s, 3H), 3.32 (s, 3H), 0.94 (s, 9H), 0.17 (d, J=2.2 Hz, 6H).

[0463] Preparation of (4): To a mixture of 3 (5.7 g, 10.80 mmol) in CD₃OD (120 mL) was added NaBD₄ (1.63 g, 43.21 mmol) in portions at 0° C., and the mixture was stirred at 20° C. for 1 hr. Upon completion as monitored by LCMS, the reaction mixture was neutralized by AcOH (˜10 mL) and concentrated under reduced pressure to give a residue. The residue was purified by flash silica gel chromatography (ISCO®; 40 g SepaFlash® Silica Flash Column, Eluent of 0˜5%, MeOH/DCM gradient @ 40 mL/min) to give 4 (4.15 g, 7.61 mmol, 70.45% yield) as a yellow solid. ESI-LCMS: 502.2 [M+H]⁺; ¹H NMR (400 MHz, DMSO-d₆) δ=11.23 (s, 1H), 8.76 (s, 2H), 8.04 (d, J=7.3 Hz, 2H), 7.69-7.62 (m, 1H), 7.60-7.52 (m, 2H), 6.14 (d, J=6.0 Hz, 1H), 5.18 (s, 1H), 4.60-4.51 (m, 2H), 3.98 (d, J=3.0 Hz, 1H), 3.32 (s, 3H), 0.92 (s, 9H), 0.13 (d, J=1.5 Hz, 6H).

[0464] Preparation of (5): To a solution of 4 (4.85 g, 9.67 mmol) in pyridine (50 mL) was added DMTrCl (5.90 g, 17.40 mmol) at 25° C. and the mixture was stirred for 2 hr. Upon completion as monitored by LCMS, the reaction mixture was concentrated under reduced pressure to remove pyridine. The residue was diluted with EtOAc (150 mL) and washed with H₂O (50 mL*3), dried over Na₂SO₄, filtered and concentrated under reduced pressure to give a residue. The residue was purified by flash silica gel chromatography (ISCO®; 80 g SepaFlash® Silica Flash Column, Eluent of 0˜70%, EA/PE gradient @ 60 mL/min) to give 5 (6.6 g, 84.06% yield) as a yellow solid. ESI-LCMS: 804.3 [M+H], ¹H NMR (400 MHz, DMSO-d₆) δ=11.22 (s, 1H), 8.68 (d, J=11.0 Hz, 2H), 8.03 (d, J=7.3 Hz, 2H), 7.68-7.60 (m, 1H), 7.58-7.49 (m, 2H), 7.37-7.30 (m, 2H), 7.27-7.16 (m, 7H), 6.88-6.79 (m, 4H), 6.17 (d, J=4.2 Hz, 1H), 4.72 (t, J=5.0 Hz, 1H), 4.60 (t, J=4.5 Hz, 1H), 4.03-3.98 (m, 1H), 3.71 (s, 6H), 0.83 (s, 9H), 0.12-0.03 (m, 6H).

[0465] Preparation of (6): To a solution of 5 (6.6 g, 8.21 mmol) in THF (16 mL) was added TBAF (1 M, 8.21 mL), and the mixture was stirred at 20° C. for 2 hr. Upon completion as monitored by LCMS, the reaction mixture was diluted with EA (150 mL) and washed with H₂O (50 mL*3). The organic layer was washed with brine (150 mL), dried over Na₂SO₄, filtered and concentrated under reduced pressure to give a residue. The residue was purified by flash silica gel chromatography (ISCO®; 80 g SepaFlash® Silica Flash Column, Eluent of 10-100%, EA/PE gradient @ 30 mL/min) to give 6 (5.4 g, 94.4% yield) as a yellow solid. ESI-LCMS: 690.3 [M+H]⁺; ¹H NMR (400 MHz, DMSO-d₆) δ=11.24 (s, 1H), 8.69 (s, 1H), 8.62 (s, 1H), 8.05 (d, J=7.3 Hz, 2H), 7.69-7.62 (m, 1H), 7.60-7.52 (m, 2H), 7.40-7.33 (m, 2H), 7.30-7.18 (m, 7H), 6.84 (dd, J=5.9, 8.9 Hz, 4H), 6.19 (d, J=4.8 Hz, 1H), 5.36 (d, J=6.0 Hz, 1H), 4.59-4.52 (m, 1H), 4.48 (q, J=5.1 Hz, 1H), 4.11 (d, J=4.8 Hz, 1H), 3.72 (d, J=1.0 Hz, 6H), 3.40 (s, 3H).

[0466] Preparation of (Example 6 monomer): To a solution of 6 (8.0 g, 11.60 mmol) in MeCN (150 mL) was added P-1 (4.54 g, 15.08 mmol, 4.79 mL) at 0° C., followed by DCI (1.51 g, 12.76 mmol) in one portion. The mixture was warmed to 20° C. and stirred for 2 h. Upon completion as monitored by LCMS, the reaction mixture was quenched by addition of saturated aq. NaHCO₃ (50 mL) and diluted with DCM (250 mL). The organic layer was washed with saturated aq. NaHCO₃ (50 mL*2), dried over Na₂SO₄, filtered and concentrated under reduced pressure. The residue was purified by a flash silica gel column (0% to 60% EA in PE contain 0.5% TEA) to give Example 6 monomer (5.75 g, 55.37% yield, 99.4% purity) as a white solid. ESI-LCMS: 890.4 [M+H]⁺; ¹H NMR (400 MHz, CD₃CN) δ=9.55 (s, 1H), 8.63-8.51 (m, 1H), 8.34-8.24 (m, 1H), 7.98 (br d, J=7.5 Hz, 2H), 7.65-7.55 (m, 1H), 7.53-7.46 (m, 2H), 7.44-7.37 (m, 2H), 7.32-7.17 (m, 7H), 6.84-6.77 (m, 4H), 6.14 (d, J=4.3 Hz, 1H), 4.84-4.73 (m, 1H), 4.72-4.65 (m, 1H), 4.34-4.27 (m, 1H), 3.91-3.61 (m, 9H), 3.50-3.43 (m, 3H), 2.72-2.61 (m, 1H), 2.50 (t, J=6.0 Hz, 1H), 1.21-1.15 (m, 10H), 1.09 (d, J=6.8 Hz, 2H); ³¹P NMR (162 MHz, CD₃CN) δ=150.01, 149.65

### Example 7: Synthesis of 5′ End Cap Monomer

[chemical structure]

[chemical structure]

### Example 7 Monomer Synthesis Scheme

[0467] Preparation of (2): To a solution of 1 (10 g, 27.22 mmol) in CH₃CN (200 mL) and H₂O (50 mL) were added TEMPO (3.85 g, 24.50 mmol) and DIB (17.54 g, 54.44 mmol). The mixture was stirred at 25° C. for 12 h. Upon completion as monitored by LCMS, the reaction mixture was concentrated under reduced pressure to give a residue. The residue was triturated with EtOAc (600 mL) for 30 min. The resulting suspension was filtered and the collected solid was washed with EtOAc (300 mL*2) to give 2 (20.09 g, 91.5% yield) as a white solid. ESI-LCMS: 382.0 [M+H]⁺.

[0468] Preparation of (3): To a solution of 2 (6 g, 15.73 mmol) in MeOH (100 mL) was added SOCl₂ (2.81 g, 23.60 mmol, 1.71 mL) dropwise at 0° C. The mixture was stirred at 25° C. for 12 h. Upon completion as monitored by LCMS, the reaction mixture was quenched by addition of NaHCO₃ (4 g) and stirred at 25° C. for 30 min. The reaction mixture was filtered and the filtrate was concentrated under reduced pressure to give 3 (18.8 g, 95.6% yield) as a white solid. The crude product was used for the next step without further purification. (The reaction was set up in parallel 3 batches and combined). ESI-LCMS: 396.1 [M+H]⁺; ¹H NMR (400 MHz, DMSO-d₆) δ=12.26-11.57 (m, 2H), 8.42-8.06 (m, 1H), 6.14-5.68 (m, 2H), 4.56 (s, 2H), 4.33 (dd, J=4.0, 7.3 Hz, 1H), 3.77 (m, 3H), 3.30 (s, 3H), 2.81-2.69 (m, 1H), 1.11 (s, 6H)

[0469] Preparation of (4 & 5): To a mixture of 3 (10.1 g, 25.55 mmol) in CD₃OD (120 mL) was added NaBD₄ (3.29 g, 86.86 mmol, 3.4 eq) in portions at 0° C. The mixture was stirred at 25° C. for 1 h. Upon completion as monitored by LCMS, the reaction mixture was neutralized with AcOH (˜15 mL) and concentrated under reduced pressure to give a residue. The residue was purified by flash silica gel chromatography (ISCO®; 120 g SepaFlash® Silica Flash Column, Eluent of 0˜7.4%, MeOH/DCM gradient @ 80 mL/min) to give 4 (2.98 g, 6.88 mmol, 27% yield) as a yellow solid. ESI-LCMS: 370.1 [M+H]⁺ and 5 (10.9 g, crude) as a yellow solid. ESI-LCMS: 300.1 [M+H]⁺; ¹H NMR (400 MHz, CD₃OD) δ=7.85 (s, 1H), 5.87 (d, J=6.0 Hz, 1H), 4.46-4.39 (m, 1H), 4.34 (t, J=5.4 Hz, 1H), 4.08 (d, J=3.1 Hz, 1H), 3.49-3.38 (m, 4H)

[0470] Preparation of 6: To a solution of 4 (1.9 g, 4.58 mmol, 85.7% purity) in pyridine (19 mL) was added DMTrCl (2.02 g, 5.96 mmol). The mixture was stirred at 25° C. for 2 h under N₂. Upon completion as monitored by LCMS, the reaction mixture was quenched by MeOH (10 mL) and concentrated under reduce pressure to give a residue. The residue was diluted with H₂O (10 mL*3) and extracted with EA (20 mL*3). The combined organic layers were washed with brine (20 mL), dried over anhydrous Na₂SO₄, filtered and concentrated under reduce pressure to give a residue. The residue was purified by flash silica gel chromatography (ISCO®; 25 g SepaFlash® Silica Flash Column, Eluent of 0˜77%, PE: (EA with 10% EtOH): 1% TEA@ 35 mL/min) to give 6 (2.6 g, 81.71% yield, 96.71% purity) as a white foam. ESI-LCMS: 672.2 [M+H]⁺; ¹H NMR (400 MHz, CDCl₃) δ=12.02 (s, 1H), 7.96 (s, 1H), 7.83 (s, 1H), 7.51 (d, J=7.4 Hz, 2H), 7.37 (d, J=8.6 Hz, 4H), 7.25-7.17 (m, 2H), 6.80 (t, J=8.4 Hz, 4H), 5.88 (d, J=6.3 Hz, 1H), 4.69 (t, J=5.7 Hz, 1H), 4.64 (s, 1H), 4.54 (s, 1H), 4.19 (d, J=2.9 Hz, 1H), 3.77 (d, J=4.5 Hz, 6H), 3.60-3.38 (m, 3H), 2.81 (s, 1H), 1.81 (td, J=6.9, 13.7 Hz, 1H), 0.97 (d, J=6.8 Hz, 3H), 0.80 (d, J=6.9 Hz, 3H).

[0471] Preparation of Example 7 monomer: To a solution of 6 (8.4 g, 12.5 mmol) in MeCN (80 mL) was added P-1 (4.9 g, 16.26 mmol, 5.16 mL) at 0° C., followed by addition of DCI (1.624 g, 13.76 mmol) in one portion at 0° C. under Ar. The mixture was stirred at 25° C. for 2 h. Upon completion as monitored by LCMS, the reaction mixture was quenched with saturated aq. NaHCO₃ (20 mL) and extracted with DCM (50 mL*2). The combined organic layers were dried over anhydrous Na₂SO₄, filtered and concentrated under reduce pressure to give a residue. The residue was purified by flash silica gel chromatography (ISCO®; 40 g SepaFlash® Silica Flash Column, Eluent of 0˜52% PE:EA (10% EtOH): 5% TEA, @ 80 mL/min) to give Example 7 monomer (3.4 g, 72.1% yield) as a white foam. ESI-LCMS: 872.4 [M+H]⁺; ¹H NMR (400 MHz, CD₃CN) δ=12.46-11.07 (m, 1H), 9.29 (s, 1H), 7.84 (d, J=14.6 Hz, 1H), 7.42 (t, J=6.9 Hz, 2H), 7.34-7.17 (m, 7H), 6.85-6.77 (m, 4H), 5.95-5.77 (m, 1H), 4.56-4.40 (m, 2H), 4.24 (dd, J=4.0, 13.3 Hz, 1H), 3.72 (d, J=2.0 Hz, 7H), 3.66-3.53 (m, 3H), 3.42 (d, J=11.8 Hz, 3H), 2.69-2.61 (m, 1H), 2.60-2.42 (m, 2H), 1.16-1.00 (m, 18H); ³¹P NMR (162 MHz, CD₃CN) δ=149.975, 149.9.

### Example 8: Synthesis of 5′ End Cap Monomer

[chemical structure]

[chemical structure]

### Example 8 Monomer Synthesis Scheme

[0472] Preparation of (2): To a solution of 1 (40 g, 58.16 mmol) in DMF (60 mL) were added imidazole (11.88 g, 174.48 mmol), NaI (13.08 g, 87.24 mmol), and TBSCl (17.52 g, 116.32 mmol) at 20° C. in one portion. The reaction mixture was stirred at 20° C. for 12 h. Upon completion, the mixture was diluted with EA (200 mL). The organic layer was washed with brine/water (80 mL/80 mL*4), dried over Na₂SO₄, filtered and evaporated to give 2 (50.8 g, crude) as yellow solid. ESI-LCMS: 802.3 [M+H]⁺

[0473] Preparation of (3): To a solution of 2 (8.4 g, 10.47 mmol) in DCM (120 mL) were added Et₃SiH (3.06 g, 26.3 mmol, 4.2 mL) and TFA (1.29 g, 0.84 mL) dropwise at 0° C. The reaction mixture was stirred at 20° C. for 2 h. The reaction mixture was washed with saturated aq·NaHCO₃ (15 mL) and brine (80 mL). The organic layer was dried over Na₂SO₄, filtered and evaporated. The residue was purified by flash silica gel chromatography (ISCO®; 80 g SepaFlash® Silica Flash Column, Eluent of 0˜83% EA/PE gradient @ 80 mL/min) to give 3 (2.92 g, 55.8% yield) as a white solid. ESI-LCMS: 500.2 [M+H]⁺; ¹H NMR (400 MHz, CDCl₃) δ=8.79 (s, 1H), 8.14 (s, 1H), 8.02 (d, J=7.6 Hz, 2H), 7.64-7.58 (m, 1H), 7.56-7.49 (m, 2H), 5.98-5.93 (m, 1H), 4.63-4.56 (m, 2H), 4.23 (s, 1H), 3.98 (dd, J=1.5, 13.1 Hz, 1H), 3.75 (dd, J=1.5, 13.1 Hz, 1H), 3.28 (s, 3H), 2.06-1.99 (m, 1H), 1.00-0.90 (m, 9H), 0.15 (d, J=7.0 Hz, 6H).

[0474] Preparation of (4): 3 (6 g, 12.01 mmol) and tert-butyl N-methylsulfonylcarbamate (3.52 g, 18.01 mmol) were co-evaporated with toluene (50 mL), dissolved in dry THF (100 mL), and cooled to 0° C. PPh₃ (9.45 g, 36.03 mmol) was then added, followed by dropwise addition of DIAD (7.28 g, 36.03 mmol, 7.00 mL) in dry THF (30 mL). The reaction mixture was stirred at 20° C. for 18 h. Upon completion, the reaction mixture was then diluted with DCM (100 mL) and washed with water (70 mL) and brine (70 mL), dried over Na₂SO₄, filtered and evaporated to give a residue. The residue was purified by flash silica gel chromatography (ISCO®; 80 g SepaFlash® Silica Flash Column, Eluent of 0˜100% Ethyl acetate/Petroleum ether gradient @ 60 mL/min) followed by reverse-phase HPLC (0.1% NH₃·H₂O condition, eluent at 74%) to give 4 (2.88 g, 25% yield) as a white solid. ESI-LCMS: 677.1 [M+H]⁺; ¹H NMR (400 MHz, CDCl₃) δ=9.24 (s, 1H), 8.84 (s, 1H), 8.36 (s, 1H), 8.05 (br d, J=7.3 Hz, 2H), 7.66-7.42 (m, 4H), 6.16 (d, J=5.0 Hz, 1H), 4.52 (br t, J=4.5 Hz, 1H), 4.25-4.10 (m, 1H), 3.97 (br dd, J=8.0, 14.8 Hz, 1H), 3.48 (s, 3H), 3.27 (s, 3H), 1.54 (s, 9H), 0.95 (s, 9H), 0.14 (d, J=0.8 Hz, 6H).

[0475] Preparation of (5): To a solution of 4 (2.8 g, 4.14 mmol) in THF (20 mL) was added TBAF (4 M, 1.03 mL) and the mixture was stirred at 20° C. for 12 h. The reaction mixture was then evaporated. The residue was purified by flash silica gel chromatography (ISCO®; 12 g SepaFlash® Silica Flash Column, Eluent of 0˜6% MeOH/ethyl acetate gradient @ 20 mL/min) to give 5 (2.1 g, 83.92% yield) as a white solid. ESI-LCMS: 563.1 [M+H]⁺; ¹H NMR (400 MHz, CDCl₃) δ=8.85-8.77 (m, 1H), 8.38 (s, 1H), 8.11-7.99 (m, 2H), 7.64-7.50 (m, 4H), 6.19 (d, J=2.8 Hz, 1H), 4.36-4.33 (m, 1H), 4.29 (br d, J=4.3 Hz, 1H), 4.22-4.02 (m, 2H), 3.65-3.59 (m, 3H), 3.28 (s, 3H), 1.54 (s, 9H).

[0476] Preparation of (6): To a solution of 5 (2.1 g, 3.73 mmol) in DCM (20 mL) was added TFA (7.70 g, 67.53 mmol, 5 mL) at 0° C. The reaction mixture was stirred at 20° C. for 24 h. Upon completion, the reaction was quenched with saturated aq. NaHCO₃ to reach pH 7. The organic layer was dried over Na₂SO₄, filtered, and evaporated at low pressure. The residue was purified by flash silica gel chromatography (ISCO®; 12 g SepaFlash® Silica Flash Column, Eluent of 0˜7% DCM/MeOH gradient @ 20 mL/min) to give 1.6 g (impure, 75% LCMS purity), followed by prep-HPLC [FA condition, column: Boston Uni C18 40*150*5 um; mobile phase: [water (0.225% FA)-ACN]; B %: 8%-38%, 7.7 min.] to give 6 (1.04 g, 63.7% yield) as a white solid. ESI-LCMS: 485.0 [M+Na]⁺; ¹H NMR (400 MHz, DMSO-d₆) δ=11.27-11.21 (m, 1H), 8.77 (s, 1H), 8.74 (s, 1H), 8.05 (d, J=7.3 Hz, 2H), 7.68-7.62 (m, 1H), 7.59-7.53 (m, 2H), 7.39 (t, J=6.3 Hz, 1H), 6.16 (d, J=6.0 Hz, 1H), 5.48 (d, J=5.5 Hz, 1H), 4.55 (t, J=5.5 Hz, 1H), 4.43-4.37 (m, 1H), 4.08-4.02 (m, 1H), 3.41-3.36 (m, 1H), 3.35 (s, 3H), 3.31-3.22 (m, 1H), 2.91 (s, 3H).

[0477] Preparation of (Example 8 monomer): To a solution of 6 (1 g, 2.16 mmol) in DCM (30 mL) was added P1 (977.58 mg, 3.24 mmol, 1.03 mL), followed by DCI (306.43 mg, 2.59 mmol) at 0° C. in one portion under Ar atmosphere. The mixture was degassed and purged with Ar for 3 times, warmed to 20° C., and stirred for 2 hr under Ar atmosphere. Upon completion as monitored by LCMS and TLC (PE:EtOAc=4:1), the reaction mixture was diluted with sat.aq. NaHCO₃ (30 mL) and extracted with DCM (50 mL*2). The combined organic layers were dried over anhydrous Na₂SO₄, filtered, and the filtrate was concentrated under reduced pressure to give a residue. The crude product was purified by reversed-phase HPLC (40 g C18 column: neutral condition, Eluent of 0˜57% of 0.3% NH₄HCO₃ in H₂O/CH₃CN ether gradient @ 35 mL/min) to give Example 8 monomer (0.49 g, 33.7% yield) as a white solid. ESI-LCMS: 663.1 [M+H]⁺; ¹H NMR (400 MHz, CD₃CN) δ=1.19-1.29 (m, 12H) 2.71 (q, J=5.77 Hz, 2H) 2.94 (d, J=6.27 Hz, 3H) 3.35 (d, J=15.56 Hz, 3H) 3.40-3.52 (m, 2H) 3.61-3.97 (m, 4H) 4.23-4.45 (m, 1H) 4.55-4.74 (m, 2H) 6.02 (dd, J=10.67, 6.40 Hz, 1H) 7.25 (br s, 1H) 7.47-7.57 (m, 2H) 7.59-7.68 (m, 1H) 8.01 (d, J=7.78 Hz, 2H) 8.28 (s, 1H) 8.66 (s, 1H) 9.69 (br s, 1H); ³¹P NMR (162 MHz, CD₃CN) δ=150.92, 149.78.

### Example 9. Synthesis of 5′-Stabilized End Cap Modified Oligonucleotides

[0478] This example provides an exemplary method for synthesizing the siNAs comprising a 5′-stabilized end caps disclosed herein. The 5′-stabilized end cap and/or deuterated phosphoramidites were dissolved in anhydrous acetonitrile and oligonucleotide synthesis was performed on a Expedite 8909 Synthesizer using standard phosphoramidite chemistry. An extended coupling (12 minutes) of 0.12 M solution of phosphoramidite in anhydrous CH₃CN in the presence of Benzyl-thio-tetrazole (BTT) activator to a solid bound oligonucleotide followed by standard capping, oxidation and sulfurization produced modified oligonucleotides. The 0.02 M 12, THF: Pyridine; Water 7:2:1 was used as an oxidizing agent, while DDTT (dimethylamino-methylidene)amino)-3H-1,2,4-dithiazaoline-3-thione was used as the sulfur-transfer agent for the synthesis of oligoribonucleotide with a phosphorothioate backbone. The stepwise coupling efficiency of all modified phosphoramidites was achieved around 98%. After synthesis the solid support was heated with aqueous ammonia (28%) solution at 45° C. for 16 h or 0.05 M K₂CO₃ in methanol was used to deprotect the base labile protecting groups. The crude oligonucleotides were precipitated with isopropanol and centrifuged (Eppendorf 5810R, 3000 g, 4° C., 15 min) to obtain a pellet. The crude product was then purified using ion exchange chromatography (TSK gel column, 20 mM NaH₂PO₄, 10% CH₃CN, 1 M NaBr, gradient 20-60% 1 M NaBr over 20 column volumes) and fractions were analyzed by ion change chromatography on an HPLC. Pure fractions were pooled and desalted by Sephadex G-25 column and evaporated to dryness. The purity and molecular weight were determined by HPLC analysis and ESI-MS analysis. Single strand RNA oligonucleotides (sense and antisense strand) were annealed (1:1 by molar equivalents) at 90° C. for 3 min followed by RT 40 min) to produce the duplexes.

### Example 10. Synthesis of Monomer

[chemical structure]

[0479] Preparation of (2a): To a solution of 1a (10.0 g, 29.5 mmol) in ACN (200.0 mL), KSAc (13.5 g, 118.6 mmol) was added at r.t., the mixture was stirred at r.t. for 15 h, TLC showed 1a was consumed completely. Mixture was filtered by silica gel and filter cake was washed with DCM (100.0 mL), the filtrate was concentrated to give crude 2a (11.1 g) as an oil. ¹H-NMR (400 MHz, CDCl₃): δ 7.32-7.24 (m, 5H), 7.16 (d, J=8.9 Hz, 4H), 6.82 (d, J=8.9 Hz, 4H), 3.82 (s, 6H), 2.28 (s, 3H).

[0480] Preparation of (3a): To a solution of crude 2a (11.1 g, 29.2 mmol) in THF (290.0 mL), LiAlH₄ (2.0 g, 52.6 mmol) was added at 0° C. and kept for 10 min, reaction was stirred at r.t. for 5 h under N₂, TLC showed 2a was consumed completely. Mixture was put into aqueous NaHCO₃ solution and extracted with EA (500.0 mL*2), organic phase was concentrated to give crude which was purified by column chromatography (SiO₂, PE/EA=30:1 to 10:1) to give 3a (8.1 g, 95% purity) as a white solid. ESI-LCMS: m/z 335.3 [M−H]⁻; ¹H-NMR (400 MHz, CDCl₃): δ 7.33-7.24 (m, 5H), 7.19 (d, J=8.8 Hz, 4H), 6.82 (d, J=8.8 Hz, 4H), 3.83 (s, 6H), 3.09 (s, 1H).

[0481] Preparation of (2): To a solution of 1 (20.0 g, 81.3 mmol) in pyridine (400.0 mL), MsCl (10.23 g, 89.43 mmol) was added dropwise at −10° C., reaction was stirred at −10° C. for 1 h, LCMS showed 1 was consumed completely, 100.0 mL aqueous NaHCO₃ solution was added and extracted with DCM (100.0 mL*2), organic phase was concentrated to give crude which was purified by column chromatography (SiO₂, DCM/MeOH=30:1 to 10:1) to give 2 (9.5 g, 97% purity) as a white solid. ESI-LCMS: m/z 325.3 [M+H]⁺; ¹H-NMR (400 MHz, DMSO-d₆): δ 11.45 (s, 1H), 7.64-7.62 (d, J=8.0 Hz, 1H), 5.92-5.85 (m, 2H), 5.65-5.63 (d, J=8.0 Hz, 1H), 5.26-5.11 (m, 1H), 4.53-4.37 (m, 2H), 4.27-4.16 (m, 1H), 4.10-4.04 (m, 1H), 3.23 (s, 3H).

[0482] Preparation of (3): Intermediate 3 was prepared by prepared according to reaction condition described in reference Helvetica Chimica Acta, 2004, 87. 2812. To a solution of 2 (9.2 g, 28.3 mmol) in dry DMSO (130.0 mL). DMTrSH (14.31 g, 42.5 mmol) was added, followed by tetramethylguanidine (3.6 g, 31.2 mmol) was added under N₂, reaction was stirred at r.t. for 3 h, LCMS showed 2 was consumed completely. 100.0 mL H₂O was added and extracted with EA (100.0 mL*2), organic phase was concentrated to give crude which was purified by column chromatography (SiO₂, PE/EA=5:1 to 1:1) to give 3 (12.0 g, 97% purity) as a white solid. ESI-LCMS: m/z 563.2 [M−H]⁻; ¹H-NMR (400 MHz, DMSO-d₆): δ 11.43-11.42 (d, J=4.0 Hz, 1H), 7.57-7.55 (d, J=8.0 Hz, 1H), 7.33-7.17 (m, 9H), 6.89-6.86 (m, 4H), 5.80-5.74 (m, 1H), 5.65-5.62 (m, 1H), 5.58-5.57 (d, J=4.0 Hz, 1H), 5.16-5.01 (m, 1H), 3.98-3.90 (m, 1H), 3.73 (s, 6H), 3.73-3.67 (m, 1H), 2.50-2.37 (m, 2H).

[0483] Preparation of Example 10 monomer: To a solution of 3 (10.0 g, 17.7 mmol) in dichloromethane (120.0 mL) with an inert atmosphere of nitrogen was added CEOP[N(iPr)₂]₂ (6.4 g, 21.2 mmol) and DCI (1.8 g, 15.9 mmol) in order at room temperature. The resulting solution was stirred for 1.0 h at room temperature and diluted with 50 mL dichloromethane and washed with 2×50 mL of saturated aqueous sodium bicarbonate and 1×50 mL of saturated aqueous sodium chloride respectively. The organic phase was dried over anhydrous sodium sulfate, filtered and concentrated till no residual solvent left under reduced pressure. The residue was purified by Flash-Prep-HPLC with the following conditions (IntelFlash-1): Column, C18 silica gel; mobile phase, CH₃CN/H₂O (0.5% NH₄HCO₃)=1/1 increasing to CH₃CN/H₂O (0.5% NH₄HCO₃)=1/0 within 20 min, the eluted product was collected at CH₃CN/H₂O (0.5% NH₄HCO₃)=6/1; Detector, UV 254 nm. This resulted in to give Example 10 monomer (12.8 g, 98% purity, 93% yield) as an oil. ESI-LCMS: m/z 765.2 [M+H]⁺; ¹H-NMR (400 MHz, DMSO-d₆): δ 11.44 (s, 1H), 7.70-7.66 (m, 1H), 7.32-7.18 (m, 9H), 6.89-6.85 (m, 4H), 5.80-5.64 (m, 2H), 5.38-5.22 (m, 1H), 4.38-4.15 (m, 1H), 3.81-3.70 (m, 8H), 3.61-3.43 (m, 3H), 2.76-2.73 (m, 1H), 2.66-2.63 (m, 1H), 2.50-2.41 (m, 2H), 1.12-1.05 (m, 9H), 0.97-0.95 (m, 3H); ³¹P-NMR (162 MHz, DMSO-d₆): δ 149.01, 148.97, 148.74, 148.67; ¹⁹F-NMR (376 MHz, DMSO-d₆): δ 149.01, 148.97, 148.74, 148.67.

### Example 11. Synthesis of Monomer

[chemical structure]

[0484] Preparation of (2): To a stirred solution of 1 (2.0 g, 8.8 mmol) in pyridine (20 mL) were added DMTrCl (3.3 g, 9.7 mmol) at r.t. The reaction mixture was stirred at r.t. for 2.5 hrs. With ice-bath cooling, the reaction was quenched with water and the product was extracted with EA (100 mL). The organic phase was evaporated to dryness under reduced pressure to give a residue which was purified by silica gel column chromatography (eluent, DCM:MeOH=50:1˜20:1) to give 2 (3.7 g, 7.2 mmol, 80.1%) as a white solid. ESI-LCMS: m/z 527 [M−H]⁻.

[0485] Preparation of (3): To the solution of 2 (2.8 g, 5.3 mmol) in dry DMF (56 mL) was added (CD₃O)₂ Mg (2.9 g, 31.8 mmol) at r.t. under N₂ atmosphere. The reaction mixture was stirred at 100° C. for 15 hrs. With ice-bath cooling, the reaction was quenched with saturated aq. NH₄Cl and extracted with EA (300 mL). The combined organic layer was washed with water and brine, dried over Na₂SO₄, and concentrated to give a residue which was purified by Flash-Prep-HPLC with the following conditions (IntelFlash-1): Column, C18 silica gel; mobile phase, CH₃CN/H₂O (0.5% NH₄HCO₃)=2/3 increasing to CH₃CN/H₂O (0.5% NH₄HCO₃)=3/2 within 20 min, the eluted product was collected at CH₃CN/H₂O (0.5% NH₄HCO₃)=1/1; Detector, UV 254 nm. This resulted in to give 3 (2.0 g, 3.6 mmol, 67.9%) as a white solid. ESI-LCMS: m/z 562 [M−H]⁻: ¹H-NMR (400 MHz, DMSO-d₆): δ 11.38 (s, 1H), 7.73 (d, J=8 Hz, 1H), 7.46-7.19 (m, 9H), 6.91 (d, J=7.4 Hz, 4H), 5.81-5.76 (AB, J=20 Hz, 1H), 5.30 (d, J=8 Hz, 1H), 5.22 (s, 1H), 4.25-4.15 (m, 1H), 3.99-3.92 (m, 1H), 3.85-3.79 (m, 1H), 3.74 (s, 6H), 3.34-3.18 (m, 31H).

[0486] Preparation of Example 11 monomer: To a suspension of 3 (2.0 g, 3.5 mmol) in DCM (20 mL) was added DCI (357 mg, 3.0 mmol) and CEP[N(iPr)₂]₂ (1.3 g, 4.3 mmol). The mixture was stirred at r.t. for 1 h. LC-MS showed 3 was consumed completely. The solution was washed with water twice and washed with brine and dried over Na₂SO₄. Then concentrated to give a residue which was purified by Flash-Prep-HPLC with the following conditions (IntelFlash-1): Column, C18 silica gel; mobile phase, CH₃CN/H₂O (0.5% NH₄HCO₃)=1/1 increasing to CH₃CN/H₂O (0.5% NH₄HCO₃)=1/0 within 20 min, the eluted product was collected at CH₃CN/H₂O (0.5% NH₄HCO₃)=1/0; Detector, UV 254 nm. This resulted in to give Example 11 monomer (2.1 g, 2.7 mmol, 77.1%) as a white solid. ESI-LCMS: m/z 764 [M+H]⁺; ¹H-NMR (400 MHz, ACN-d₃): δ 9.45-8.90 (m, 1H, exchanged with D₂O), 7.88-7.66 (m, 1H), 7.50-7.18 (m, 9H), 6.93-6.80 (m, 4H), 5.85 (d, J=8.2 Hz, 1H), 5.29-5.16 (m, 1H), 4.57-4.37 (m, 1H), 4.18-4.09 (m, 1H), 3.98-3.90 (m, 1H), 3.90-3.74 (m, 7H), 3.74-3.50 (m, 3H), 3.48-3.31 (m, 2H), 2.70-2.61 (m, 1H), 2.56-2.46 (m, 1H), 1.24-1.12 (m, 9H), 1.09-0.99 (m, 3H). ³¹P-NMR (162 MHz, ACN-d₃): δ=149.87, 149.55.

### Example 12. Synthesis of Monomer

[chemical structure]

[0487] Preparation of (2): To the solution of 1 (39.2 g, 151.9 mmol) in DMF (390.0 mL) was added imidazole (33.0 g, 485.3 mmol) and TBSCl (57.2 g, 379.6 mmol) at 0° C. The reaction mixture was stirred at room temperature for 15 hrs under N₂ atmosphere. After addition of water, the resulting mixture was extracted with EA (500.0 mL). The combined organic layer was washed with water and brine, dried over Na₂SO₄, concentrated to give the crude 2 (85.6 g) as a white solid which was used directly for next step. ESI-LCMS: m/z 487.7 [M+H]⁺.

[0488] Preparation of (3): A solution of crude 2 (85.6 g) in a mixture solvent of TFA/H₂O=1/1 (400.0 mL) and THF (400.0 mL) was stirred at 0° C. for 30 min. After completion of reaction, the resulting mixture was added con. NH₃*H₂O to pH=7, and then extracted with EA (500.0 mL). The organic layer was washed with brine, dried over sodium sulfate and removed to give the residue was purified by Flash-Prep-HPLC with the following conditions (IntelFlash-1): Column, C18 silica gel; mobile phase, CH₃CN/H₂O (0.5% NH₄HCO₃)=2/3 increasing to CH₃CN/H₂O (0.5% NH₄HCO₃)=3/2 within 20 min, the eluted product was collected at CH₃CN/H₂O (0.5% NH₄HCO₃)=1/1; Detector, UV 254 nm. This resulted in to give 3 (36.6 g, 98.4 mmol, 64.7% over two step) as a white solid. ESI-LCMS: m/z 372.5 [M+H]⁺; ¹H-NMR (400 MHz, DMSO-d₆): δ 11.36 (d, J=1 Hz, 1H), 7.92 (d, J=8 Hz, 1H), 5.83 (d, J=5 Hz, 1H), 5.67-5.65 (m, 1H), 5.19 (s, 1H), 4.30 (t, J=5 Hz, 1H), 3.85-3.83 (m, 2H), 3.68-3.52 (m, 2H), 0.88 (s, 9H), 0.09 (s, 6H).

[0489] Preparation of (4): To the solution of 3 (36.6 g, 98.4 mmol) in dry DCM (200.0 mL) and DMF (50.0 mL) was added PDC (73.9 g, 196.7 mmol), tert-butyl alcohol (188.0 mL) and Ac₂O (93.0 mL) at r.t under N₂ atmosphere, the reaction mixture was stirred at r.t for 2 hrs. The solvent was removed to give a residue which was purified by silica gel column chromatography (eluent, PE/EA=4:1 ˜2:1) to give a residue which was purified by Flash-Prep-HPLC with the following conditions (IntelFlash-1): Column, C18 silica gel; mobile phase, CH₃CN/H₂O (0.5% NH₄HCO₃)=1/1 increasing to CH₃CN/H₂O (0.5% NH₄HCO₃)=1/0 within 20 min, the eluted product was collected at CH₃CN/H₂O (0.5% NH₄HCO₃)=1/0; Detector, UV 254 nm. This resulted in to give 4 (24.3 g, 54.9 mmol, 55.8%) as a white solid. ESI-LCMS: m/z 443.2 [M+H]⁺; ¹H-NMR (400 MHz, DMSO-d₆): δ 11.30 (d, J=1 Hz, 1H), 7.92 (d, J=8 Hz, 1H), 5.86 (d, J=6 Hz, 1H), 5.67-5.65 (m, 1H), 4.33-4.31 (m, 1H), 4.13 (d, J=3 Hz, 1H), 3.73-3.70 (m, 1H), 1.34 (s, 9H), 0.77 (s, 9H), 0.08 (s, 6H).

[0490] Preparation of (5): To the solution of 4 (18.0 g, 40.7 mmol) in dry THF/MeOD/D₂O=10/2/1 (145.0 mL) was added NaBD₄ (5.1 g, 122.1 mmol) three times during an hour at 50° C., the reaction mixture was stirred at r.t. for 2 hrs. After completion of reaction, adjusted pH value to 7 with CH₃COOD, after addition of water, the resulting mixture was extracted with EA (300.0 mL). The combined organic layer was washed with water and brine, dried over Na₂SO₄, concentrated to give a residue which was purified by Flash-Prep-HPLC with the following conditions (IntelFlash-1): Column, C18 silica gel; mobile phase, CH₃CN/H₂O (0.5% NH₄HCO₃)=2/3 increasing to CH₃CN/H₂O (0.5% NH₄HCO₃)=3/2 within 20 min, the eluted product was collected at CH₃CN/H₂O (0.5% NH₄HCO₃)=1/1; Detector, UV 254 nm. This resulted in to give 5 (10.4 g, 27.8 mmol, 68.3%) as a white solid. ESI-LCMS: m/z 375.2 [M+H]⁺; ¹H-NMR (400 MHz, DMSO-d₆): δ 11.36 (d, J=1 Hz, 1H), 7.92 (d, J=8 Hz, 1H), 5.83 (d, J=5 Hz, 1H), 5.67-5.65 (m, 1H), 5.19 (s, 1H), 4.30 (t, J=5 Hz, 1H), 3.85-3.83 (m, 2H), 0.88 (s, 9H), 0.09 (s, 6H).

[0491] Preparation of (6): To a stirred solution of 5 (10.4 g, 27.8 mmol) in pyridine (100.0 mL) was added DMTrCl (12.2 g, 36.1 mmol) at r.t., The reaction mixture was stirred at r.t. for 2.5 hrs, the reaction was quenched with water and extracted with EA (200.0 mL). The organic phase was evaporated to dryness under reduced pressure to give a residue which was purified by Flash-Prep-HPLC with the following conditions (IntelFlash-1): Column, C18 silica gel; mobile phase, CH₃CN/H₂O (0.5% NH₄HCO₃)=1/1 increasing to CH₃CN/H₂O (0.5% NH₄HCO₃)=1/0 within 20 min, the eluted product was collected at CH₃CN/H₂O (0.5% NH₄HCO₃)=1/0; Detector, UV 254 nm. This resulted in to give 6 (13.5 g, 19.9 mmol, 71.6%) as a white solid. ESI-LCMS: m/z 677.8 [M+H]⁺; ¹H-NMR (400 MHz, DMSO-d₆): δ 11.39 (d, J=1 Hz, 1H), 7.86 (d, J=4 Hz, 1H), 7.35-7.21 (m, 9H), 6.90-6.88 (m, 4H), 5.78 (d, J=2 Hz, 1H), 5.30-5.27 (m, 1H), 4.33-4.30 (m, 1H), 3.91 (d, J=7 Hz, 1H), 3.85-3.83 (m, 1H), 3.73 (s, 6H), 3.38 (s, 3H), 0.77 (s, 9H), 0.03 (s, 3H), 0.01 (s, 3H).

[0492] Preparation of (7): To a solution of 6 (13.5 g, 19.9 mmol) in THF (130.0 mL) was added 1 M TBAF solution (19.0 mL). The reaction mixture was stirred at r.t. for 1.5 hrs. LC-MS showed 6 was consumed completely. Water (500.0 mL) was added and extracted with EA (300.0 mL), the organic layer was washed with brine and dried over Na₂SO₄. Then the organic layer was concentrated to give a residue which was purified by Flash-Prep-HPLC with the following conditions (IntelFlash-1): Column, C18 silica gel; mobile phase, CH₃CN/H₂O (0.5% NH₄HCO₃)=2/3 increasing to CH₃CN/H₂O (0.5% NH₄HCO₃)=3/2 within 20 min, the eluted product was collected at CH₃CN/H₂O (0.5% NH₄HCO₃)=1/1; Detector, UV 254 nm. This resulted in to give 7 (10.9 g, 19.4 mmol, 97.5%) as a white solid. ESI-LCMS: m/z 563.6 [M+H]⁺; ¹H-NMR (400 MHz, DMSO-d₆): δ 11.39 (s, 1H), 7.23 (d, J=8 Hz, 1H), 7.73 (d, J=8 Hz, 1H), 7.36-7.23 (m, 9H), 6.90 (d, J=8 Hz, 4H), 5.81 (d, J=3 Hz, 1H), 5.30-5.28 (m, 1H), 5.22 (d, J=7 Hz, 1H), 4.20 (q, J=7 Hz, 1H), 3.93 (d, J=7 Hz, 1H), 3.81 (t, J=5 Hz, 1H), 3.74 (s, 6H), 3.41 (s, 3H).

[0493] Preparation of Example 12 monomer: To a suspension of 7 (10.9 g, 19.4 mmol) in DCM (100.0 mL) was added DCI (1.8 g, 15.7 mmol) and CEP[N(iPr)₂]₂ (6.1 g, 20.4 mmol). The mixture was stirred at r.t. for 1 h. LC-MS showed 7 was consumed completely.

[0494] The mixture was washed with water twice and brine, dried over Na₂SO₄. Then concentrated to give a residue which was purified by Flash-Prep-HPLC with the following conditions (IntelFlash-1): Column, C18 silica gel; mobile phase, CH₃CN/H₂O (0.5% NH₄HCO₃)=1/1 increasing to CH₃CN/H₂O (0.5% NH₄HCO₃)=1/0 within 20 min, the eluted product was collected at CH₃CN/H₂O (0.5% NH₄HCO₃)=1/0; Detector, UV 254 nm. This resulted in to give Example 12 monomer (12.5 g, 14.5 mmol, 74.7%) as a white solid. ESI-LCMS: m/z 863.6 [M+H]⁺; ¹H-NMR (400 MHz, DMSO-d₆): δ 11.39 (s, 1H), 7.81-7.55 (m, 1H), 7.40-7.22 (m, 9H), 6.92-6.87 (m, 4H), 5.83-5.80 (m, 1H), 5.32-5.25 (m, 1H), 4.46-4.34 (m, 1H), 4.10-3.98 (m, 2H), 3.84-3.73 (m, 7H), 3.60-3.50 (m, 3H), 3.42, 3.40 (s, 3H), 2.78 (t, J=6 Hz, 1H), 2.62-2.59 (m, 1H), 2.07 (s, 1H), 1.17-0.96 (m, 12H); ³¹P-NMR (162 MHz, DMSO-d₆): δ 149.37, 149.06.

### Example 13. Synthesis of Monomer

[chemical structure]

[0495] Preparation of (2): To the solution of 1 (13.0 g, 52.8 mmol) in DMF (100 mL) was added imidazole (12.6 g, 184.8 mmol) and TBSCl (19.8 g, 132.0 mmol) at 0° C., and the reaction mixture was stirred at room temperature for 15 h under N₂ atmosphere. After addition of water, the resulting product was extracted with EA (500 mL). The combined organic layer was washed with water and brine, dried over Na₂SO₄, and concentrated to give the crude 2 (30.6 g) as a white solid which was used directly for next step. ESI-LCMS: m/z 475 [M+H]⁺. WO2017106710A1

[0496] Preparation of (3): A solution of crude 2 (30.6 g) in a mixture solvent of TFA/H₂O=1/1 (100 mL) and THF (100 mL) was stirred at 0° C. for 30 min. After completion of reaction, the resulting mixture was added con. NH₃*H₂O to pH=7.5, and then the mixture was extracted with EA (500 mL), the organic layer was washed with brine, dried over Na₂SO₄ and removed to give the residue was purified by Flash-Prep-HPLC with the following conditions (IntelFlash-1): Column, C18 silica gel; mobile phase, CH₃CN/H₂O (0.5% NH₄HCO₃)=2/3 increasing to CH₃CN/H₂O (0.5% NH₄HCO₃)=3/2 within 20 min, the eluted product was collected at CH₃CN/H₂O (0.5% NH₄HCO₃)=1/1; Detector, UV 254 nm. This resulted in to give 3 (12.0 g, 33.3 mmol, 65.8% over two step) as a white solid. ESI-LCMS: m/z 361 [M+H]⁺; ¹H-NMR (400 MHz, DMSO-d₆): δ 11.39 (s, J=1 Hz, 1H, exchanged with D₂O), 7.88 (d, J=8 Hz, 1H), 5.91-5.86 (m, 1H), 5.66-5.62 (m, 1H), 5.21 (t, J=5.2 Hz, 1H, exchanged with D₂O), 5.18-5.03 (m, 1H), 4.37-4.29 (m, 1H), 3.87-3.83 (m, 1H), 3.78-3.73 (m, 1H), 3.56-3.51 (m, 1H), 0.87 (s, 9H), 0.09 (s, 6H). WO2017106710A1.

[0497] Preparation of (4): To the solution of 3 (11.0 g, 30.5 mmol) in dry DCM (60 mL) and DMF (15 mL) was added PDC (21. g, 61.0 mmol), tert-butyl alcohol (45 mL) and Ac₂O (32 mL) at r.t under N₂ atmosphere. And the reaction mixture was stirred at r.t for 2 h. The solvent was removed to give a residue which was purified by silica gel column chromatography (eluent, PE:EA=4:1˜2:1) to give a residue which was purified by Flash-Prep-HPLC with the following conditions (IntelFlash-1): Column, C18 silica gel; mobile phase, CH₃CN/H₂O (0.5% NH₄HCO₃)=1/1 increasing to CH₃CN/H₂O (0.5% NH₄HCO₃)=1/0 within 20 min, the eluted product was collected at CH₃CN/H₂O (0.5% NH₄HCO₃)=1/0; Detector, UV 254 nm. This resulted in to give 4 (9.5 g, 22.0 mmol, 72.3%) as a white solid. ESI-LCMS: m/z 431 [M+H]⁺; ¹H-NMR (400 MHz, DMSO-d₆): δ 11.45 (s, J=1 Hz, 1H, exchanged with D₂O), 7.93 (d, J=8.5 Hz, 1H), 6.02-5.97 (m, 1H), 5.76-5.74 (m, 1H), 5.29-5.14 (m, 1H), 4.59-4.52 (m, 1H), 4.29-4.27 (m, 1H), 1.46 (s, 9H), 0.89 (s, 9H), 0.12 (s, 6H).

[0498] Preparation of (5): To the solution of 4 (8.5 g, 19.7 mmol) in dry THF/MeOD/D₂O=10/2/1 (80 mL) was added NaBD₄ (2.5 g, 59.1 mmol) three times per an hour at 50° C. And the reaction mixture was stirred at r.t for 2 h. After completion of reaction, adjusted pH value to 7 with CH₃COOD, after addition of water, the resulting mixture was extracted with EA (300 mL). The combined organic layer was washed with water and brine, dried over Na₂SO₄, and concentrated to give a residue which was purified by Flash-Prep-HPLC with the following conditions (IntelFlash-1): Column, C18 silica gel; mobile phase, CH₃CN/H₂O (0.5% NH₄HCO₃)=2/3 increasing to CH₃CN/H₂O (0.5% NH₄HCO₃)=3/2 within 20 min, the eluted product was collected at CH₃CN/H₂O (0.5% NH₄HCO₃)=1/1; Detector, UV 254 nm. This resulted in to give 5 (3.5 g, 9.7 mmol, 50.3%) as a white solid. ESI-LCMS: m/z 363 [M+H]⁺; ¹H-NMR (400 MHz, DMSO-d₆): δ 11.41 (s, J=1 Hz, 1H, exchanged with D₂O), 7.88 (d, J=8 Hz, 1H), 5.91-5.86 (m, 1H), 5.66-5.62 (m, 1H), 5.19 (t, J=5.2 Hz, 1H, exchanged with D₂O), 5.18-5.03 (m, 1H), 4.37-4.29 (m, 1H), 3.87-3.83 (m, 1H), 0.88 (s, 9H), 0.10 (s, 6H).

[0499] Preparation of (6): To a stirred solution of 5 (3.4 g, 9.7 mmol) in pyridine (35 mL) were added DMTrCl (3.4 g, 10.1 mmol) at r.t. And the reaction mixture was stirred at r.t for 2.5 h. With ice-bath cooling, the reaction was quenched with water and the product was extracted with EA (200 mL). The organic phase was evaporated to dryness under reduced pressure to give a residue which was purified by Flash-Prep-HPLC with the following conditions (IntelFlash-1): Column, C18 silica gel; mobile phase, CH₃CN/H₂O (0.5% NH₄HCO₃)=1/1 increasing to CH₃CN/H₂O (0.5% NH₄HCO₃)=1/0 within 20 min, the eluted product was collected at CH₃CN/H₂O (0.5% NH₄HCO₃)=1/0; Detector, UV 254 nm. This resulted in to give 6 (PCT Int. Appl., 2019173602), (5.5 g, 8.3 mmol, 85.3%) as a white solid. ESI-LCMS: m/z 665 [M+H]⁺; ¹H-NMR (400 MHz, DMSO-d₆): δ 11.50 (d, J=1 Hz, 1H, exchanged with D₂O), 7.92 (d, J=4 Hz, 1H), 7.44-7.27 (m, 9H), 6.96-6.93 (m, 4H), 5.94 (d, J=20.5 Hz, 1H), 5.39-5.37 (m, 1H), 5.32-5.17 (m, 1H), 4.60-4.51 (m, 1H), 4.01 (d, J=8.8 Hz, 1H), 3.80 (s, 6H), 0.80 (s, 9H), 0.09 (s, 3H), −0.05 (s, 3H).

[0500] Preparation of (7): To a solution of 6 (5.5 g, 8.3 mmol) in THF (50 mL) was added 1 M TBAF solution (9 mL). The reaction mixture was stirred at r.t. for 1.5 h. LC-MS showed 6 was consumed completely. Water (500 mL) was added. The product was extracted with EA (300 mL) and the organic layer was washed with brine and dried over Na₂SO₄. Then the organic layer was concentrated to give a residue which was purified by Flash-Prep-HPLC with the following conditions (IntelFlash-1): Column, C18 silica gel; mobile phase, CH₃CN/H₂O (0.5% NH₄HCO₃)=2/3 increasing to CH₃CN/H₂O (0.5% NH₄HCO₃)=3/2 within 20 min, the eluted product was collected at CH₃CN/H₂O (0.5% NH₄HCO₃)=1/1; Detector, UV 254 nm. This resulted in to give 7 (4.1 g, 7.5 mmol, 90.0%) as a white solid. ESI-LCMS: m/z 551 [M+H]⁺; ¹H-NMR (400 MHz, DMSO-d₆): δ 11.42 (s, 1H, exchanged with D₂O), 7.76 (d, J=8.2 Hz, 1H), 7.39-7.22 (m, 9H), 6.90-6.88 (m, 4H), 5.83 (d, J=20.5 Hz, 1H), 5.65 (d, J=7.0 Hz, 1H, exchanged with D₂O), 5.29 (d, J=7.2 Hz, 1H), 5.18-5.03 (m, 1H), 4.40-4.28 (m, 1H), 4.01 (d, J=8.8 Hz, 1H), 3.74 (s, 6H).

[0501] Preparation of Example 13 monomer: To a suspension of 7 (4.1 g, 7.5 mmol) in DCM (40 mL) was added DCI (0.7 g, 6.4 mmol) and CEP[N(iPr)₂]₂ (2.9 g, 9.7 mmol). The mixture was stirred at r.t. for 1 h. LC-MS showed 7 was consumed completely. The solution was washed with water twice and washed with brine and dried over Na₂SO₄. Then concentrated to give a residue which was purified by Flash-Prep-HPLC with the following conditions (IntelFlash-1): Column, C18 silica gel; mobile phase, CH₃CN/H₂O (0.5% NH₄HCO₃)=1/1 increasing to CH₃CN/H₂O (0.5% NH₄HCO₃)=1/0 within 20 min, the eluted product was collected at CH₃CN/H₂O (0.5% NH₄HCO₃)=1/0; Detector, UV 254 nm. This resulted in to give Example 13 monomer (5.0 g, 6.6 mmol, 90.0%) as a white solid. ESI-LCMS: m/z 751 [M+H]⁺; ¹H-NMR (400 MHz, DMSO-d₆): δ 11.43 (s, 1H), 7.85-7.82 (m, 1H), 7.40-7.23 (m, 9H), 6.90-6.85 (m, 4H), 5.94-5.86 (m, 1H), 5.40-5.24 (m, 2H), 4.74-4.49 (m, 1H), 4.12-4.09 (m, 2H), 3.79-3.47 (m, 10H), 2.78-2.59 (m, 2H), 1.14-0.93 (m, 12H). ³¹P-NMR (162 MHz, DMSO-d₆): δ 149.67, 149.61, 149.32, 149.27.

### Example 14. Synthesis of Monomer

[chemical structure]

[0502] Preparation of (4): To the solution of 3 (14.3 g, 25.4 mmol, Scheme 2) in pyridine (150 mL) was added imidazole (4.5 g, 66.6 mmol) and TBSCl (6.0 g, 40.0 mmol) at 0° C., and the reaction mixture was stirred at room temperature for 15 h under N₂ atmosphere. After addition of water, the resulting mixture was extracted with EA (500 mL). The combined organic layer was washed with water and brine, dried over Na₂SO₄, and concentrated to give the crude 4 (18.0 g) as a white solid which was used directly for next step. ESI-LCMS: m/z 676 [M−H]⁻.

[0503] Preparation of (5): To the solution of crude 4 (18.0 g) in the solution of DCA (6%) in DCM (200 mL) was added TES (50 mL) at r.t, and the reaction mixture was stirred at room temperature for 5-10 min. After completion of reaction, the resulting mixture was added pyridine to pH=7, and then the solvent was removed and the residue was purified by Flash-Prep-HPLC with the following conditions (IntelFlash-1): Column, C18 silica gel; mobile phase, CH₃CN/H₂O (0.5% NH₄HCO₃)=2/3 increasing to CH₃CN/H₂O (0.5% NH₄HCO₃)=3/2 within 20 min, the eluted product was collected at CH₃CN/H₂O (0.5% NH₄HCO₃)=1/1; Detector, UV 254 nm. This resulted in to give 5 (6.5 g, 17.2 mmol, 67.7% for two step) as a white solid. ESI-LCMS: m/z 376 [M+H]⁺; ¹H-NMR (400 MHz, DMSO-d₆): δ 7.92 (d, J=8 Hz, 1H), 5.82 (d, J=5.2 Hz, 1H), 5.68-5.63 (m, 1H), 5.20-5.15 (m, 1H), 4.32-4.25 (m, 1H), 3.87-3.80 (m, 2H), 3.69-3.61 (m, 1H), 3.57-3.49 (m, 1H), 0.88 (s, 9H), 0.09 (s, 6H).

[0504] Preparation of (6): To the solution of 5 (6.5 g, 17.2 mmol) in dry DCM (35 mL) and DMF (9 mL) was added PDC (12.9 g, 34.3 mmol), tert-butyl alcohol (34 mL) and Ac₂O (17 mL) at r.t under N₂ atmosphere. And the reaction mixture was stirred at r.t for 2 hrs. The solvent was removed to give a residue which was purified by silica gel column chromatography (eluent, PE:EA=4:1˜2:1) to give a residue which was purified by Flash-Prep-HPLC with the following conditions (IntelFlash-1): Column, C18 silica gel; mobile phase, CH₃CN/H₂O (0.5% NH₄HCO₃)=1/1 increasing to CH₃CN/H₂O (0.5% NH₄HCO₃)=1/0 within 20 min, the eluted product was collected at CH₃CN/H₂O (0.5% NH₄HCO₃)=1/0; Detector, UV 254 nm. This resulted in to give 6 (5.5 g, 12.3 mmol, 70.1%) as a white solid. ESI-LCMS: m/z 446 [M+H]⁺; ¹H-NMR (400 MHz, DMSO-d₆): δ=11.29 (s, 1H), 7.91 (d, J=8.4 Hz, 1H), 5.85 (d, J=6.4 Hz, 1H), 5.71-5.61 (m, 1H), 4.35-4.28 (m, 1H), 4.12 (d, J=3.2 Hz, 1H), 3.75-3.67 (m, 1H), 1.33 (s, 9H), 0.76 (s, 9H), 0.00 (d, J=1.6 Hz, 6H).

[0505] Preparation of (7): To the solution of 6 (5.4 g, 12.1 mmol) in THF/MeOD/D₂O=10/2/1 (44 mL) was added NaBD₄ (1.5 g, 36.3 mmol) at r.t. and the reaction mixture was stirred at 50° C. for 2 hrs. After completion of reaction, adjusted pH value to 7 with CH₃COOD. Water was added, the resulting mixture was extracted with EA (500 mL). The combined organic layer was washed with water and brine, dried over Na₂SO₄, and concentrated to give a residue which was purified by Flash-Prep-HPLC with the following conditions (IntelFlash-1): Column, C18 silica gel; mobile phase, CH₃CN/H₂O (0.5% NH₄HCO₃)=2/3 increasing to CH₃CN/H₂O (0.5% NH₄HCO₃)=3/2 within 20 min, the eluted product was collected at CH₃CN/H₂O (0.5% NH₄HCO₃)=1/1; Detector, UV 254 nm. This resulted in to give 7 (2.6 g, 6.8 mmol, 56.1%) as a white solid. ESI-LCMS: m/z 378 [M+H]⁺; ¹H-NMR (400 MHz, DMSO-d₆): δ 11.35 (s, 1H), 7.91 (d, J=8.0 Hz, 1H), 5.82 (d, J=5.2 Hz, 1H), 5.69-5.60 (m, 1H), 5.14 (s, 1H), 4.34-4.20 (m, 1H), 3.88-3.76 (m, 2H), 0.87 (s, 9H), 0.08 (s, 6H).

[0506] Preparation of (8): To a stirred solution of 7 (2.6 g, 6.8 mmol) in pyridine (30 mL) were added DMTrCl (3.5 g, 10.3 mmol) at r.t. And the reaction mixture was stirred at r.t. for 2.5 hrs. With ice-bath cooling, the reaction was quenched with water and the product was extracted into EA (200 mL). The organic phase was evaporated to dryness under reduced pressure to give a residue which was purified by Flash-Prep-HPLC with the following conditions (IntelFlash-1): Column, C18 silica gel; mobile phase, CH₃CN/H₂O (0.5% NH₄HCO₃)=1/1 increasing to CH₃CN/H₂O (0.5% NH₄HCO₃)=1/0 within 20 min, the eluted product was collected at CH₃CN/H₂O (0.5% NH₄HCO₃)=1/0; Detector, UV 254 nm. This resulted in to give 8 (4.3 g, 6.3 mmol, 90.1%) as a white solid. ESI-LCMS: m/z 678 [M−H]⁻; ¹H-NMR (400 MHz, DMSO-d₆): δ 11.39 (s, 1H), 7.86 (d, J=8.0 Hz, 1H), 7.42-7.17 (m, 9H), 6.96-6.83 (m, 4H), 5.82-5.69 (m, 2H), 5.29 (d, J=8.4 Hz, 1H), 4.36-4.25 (m, 1H), 3.90 (d, J=7.2 Hz, 1H), 3.86-3.80 (m, 1H), 3.73 (s, 6H), 0.75 (s, 9H), 0.02 (s, 3H), −0.04 (s, 3H).

[0507] Preparation of (9): To a solution of 8 (4.3 g, 6.3 mmol) in THF (45 mL) was added 1 M TBAF solution (6 mL). The reaction mixture was stirred at r.t. for 1.5 hrs. LCMS showed 8 was consumed completely. Water (200 mL) was added. The product was extracted with EA (200 mL) and the organic layer was washed with brine and dried over Na₂SO₄. Then the organic layer was concentrated to give a residue which was purified by Flash-Prep-HPLC with the following conditions (IntelFlash-1): Column, C18 silica gel; mobile phase, CH₃CN/H₂O (0.5% NH₄HCO₃)=2/3 increasing to CH₃CN/H₂O (0.5% NH₄HCO₃)=3/2 within 20 min, the eluted product was collected at CH₃CN/H₂O (0.5% NH₄HCO₃)=1/1; Detector, UV 254 nm. This resulted in to give 8 (3.5 g, 6.1 mmol, 90.1%) as a white solid. ESI-LCMS: m/z 678 [M−H]⁻; ¹H-NMR (400 MHz, DMSO-d₆): δ 11.38 (d, J=2.0 Hz, 1H), 7.23 (d, J=8.0 Hz, 1H), 7.41-7.19 (m, 9H), 6.94-6.85 (m, 4H), 5.81 (d, J=4.0 Hz, 1H), 5.33-5.26 (m, 1H), 5.21 (d, J=7.2 Hz, 1H), 4.06-3.90 (m, 2H), 3.83-3.77 (m, 1H), 3.74 (s, 6H).

[0508] Preparation of Example 14 monomer: To a suspension of 9 (2.1 g, 3.7 mmol) in DCM (20 mL) was added DCI (373 mg, 3.1 mmol) and CEP[N(iPr)₂]₂ (1.3 g, 4.4 mmol). The mixture was stirred at r.t. for 1 h. LC-MS showed 9 was consumed completely. The solution was washed with water twice and washed with brine and dried over Na₂SO₄. Then concentrated to give a residue which was purified by Flash-Prep-HPLC with the following conditions (IntelFlash-1): Column, C18 silica gel; mobile phase, CH₃CN/H₂O (0.5% NH₄HCO₃)=1/1 increasing to CH₃CN/H₂O (0.5% NH₄HCO₃)=1/0 within 20 min, the eluted product was collected at CH₃CN/H₂O (0.5% NH₄HCO₃)=1/0; Detector, UV 254 nm. This resulted in to give Example 14 monomer (2.2 g, 3.5 mmol, 80%) as a white solid. ESI-LCMS: m/z 766 [M+H]⁺; ¹H-NMR (400 MHz, ACN-d₃): δ 9.65-8.86 (m, 1H, exchanged with D₂O), 7.93-7.68 (m, 1H), 7.52-7.19 (m, 9H), 6.94-6.78 (m, 4H), 5.95-5.77 (m, 1H), 5.31-5.17 (m, 1H), 4.61-4.37 (m, 1H), 4.20-4.07 (m, 1H), 4.01-3.51 (m, 10H), 2.74-2.59 (m, 1H), 2.57-2.43 (m, 1H), 1.27-1.10 (m, 9H), 1.09-0.95 (m, 3H). ³¹P-NMR (162 MHz, ACN-d₃): δ=149.88, 149.55.

### Example 15. Synthesis of Monomer

[chemical structure]

[0509] Preparation of (7): To a solution of 6 (17 g, 25.1 mmol, Scheme 3) in ACN (170 mL) was added DMAP (6.13 g, 50.3 mmol) and TEA (5.1 g, 50.3 mmol, 7.2 mL), Then added TPSCl (11.4 g, 37.7 mmol) at 0° C. under N₂ atmosphere and the mixture was stirred at r.t. for 3 h under N₂ atmosphere. Then con. NH₃·H₂O (27.3 g, 233.7 mmol) was added at r.t. and the mixture was stirred at r.t. for 16 h. The reaction was quenched with water and the product was extracted with EA (200 mL). The organic phase was concentrated to give the crude 7 (17.0 g) as a white solid which was used directly for next step.

[0510] Preparation of (8): To a stirred solution of 7 (17.0 g, 25.1 mmol) in pyridine (170 mL) were added BzCl (4.3 g, 30.1 mmol) 0° C. under N₂ atmosphere. And the reaction mixture was stirred at r.t for 2.5 h. With ice-bath cooling, the reaction was quenched with water and the product was extracted with EA (200 mL). The organic phase was evaporated to dryness under reduced pressure to give a residue which was purified by Flash-Prep-HPLC with the following conditions (IntelFlash-1): Column, C18 silica gel; mobile phase, CH₃CN/H₂O (0.5% NH₄HCO₃)=1/1 increasing to CH₃CN/H₂O (0.5% NH₄HCO₃)=1/0 within 20 min, the eluted product was collected at CH₃CN/H₂O (0.5% NH₄HCO₃)=1/0; Detector, UV 254 nm. This resulted in to give 8 (19.0 g, 24.3 mmol, 95.6% over two step) as a white solid. ESI-LCMS: m/z 780 [M+H]⁺.

[0511] Preparation of (9): To a solution of 8 (19.0 g, 24.3 mmol) in THF (190 mL) was added 1 M TBAF solution (24 mL). The reaction mixture was stirred at r.t. for 1.0 h. LC-MS showed 8 was consumed completely. Water (500 mL) was added. The product was extracted with EA (300 mL) and the organic layer was washed with brine and dried over Na₂SO₄. Then the organic layer was concentrated to give a residue which was purified by Flash-Prep-HPLC with the following conditions (IntelFlash-1): Column, C18 silica gel; mobile phase, CH₃CN/H₂O (0.5% NH₄HCO₃)=2/3 increasing to CH₃CN/H₂O (0.5% NH₄HCO₃)=3/2 within 20 min, the eluted product was collected at CH₃CN/H₂O (0.5% NH₄HCO₃)=1/1; Detector, UV 254 nm. This resulted in to give 9 (15.2 g, 23.1 mmol, 95.5%) as a white solid. ESI-LCMS: m/z 666 [M+H]⁺; ¹H-NMR (400 MHz, DMSO-d₆): δ 11.28 (s, 1H), 8.41 (m, 1H), 8.00-7.99 (m, 2H), 7.63-7.15 (m, 13H), 6.93-6.89 (m, 4H), 5.87 (s, 1H), 5.20 (d, J=7.4 Hz, 1H), 4.30 (m, 1H), 4.02 (m, 1H), 3.75 (s, 7H), 3.53 (s, 3H).

[0512] Preparation of Example 15 monomer: To a suspension of 9 (10.0 g, 15.0 mmol) in DCM (100 mL) was added DCI (1.5 g, 12.7 mmol) and CEP[N(iPr)₂]₂ (5.4 g, 18.0 mmol). The mixture was stirred at r.t. for 1 h. LC-MS showed 9 was consumed completely. The solution was washed with water twice and washed with brine and dried over Na₂SO₄. Then concentrated to give a residue which was purified by Flash-Prep-HPLC with the following conditions (IntelFlash-1): Column, C18 silica gel; mobile phase, CH₃CN/H₂O (0.5% NH₄HCO₃)=1/1 increasing to CH₃CN/H₂O (0.5% NH₄HCO₃)=1/0 within 20 min, the eluted product was collected at CH₃CN/H₂O (0.5% NH₄HCO₃)=1/0; Detector, UV 254 nm. This resulted in to give Example 15 monomer (11.5 g, 13.5 mmol, 90.7%) as a white solid. ESI-LCMS: m/z 866 [M+H]⁺; ¹H-NMR (400 MHz, DMSO-d₆): δ=11.28 (s, 1H), 8.48-8.41 (m, 1H), 8.00-7.99 (m, 2H), 7.63-7.11 (m, 13H), 6.93-6.89 (m, 4H), 5.92 (m, 1H), 4.55-4.44 (m, 1H), 4.17 (m, 1H), 3.95 (m, 1H), 3.80-3.62 (m, 7H), 3.57-3.46 (m, 5H), 3.32 (s, 1H), 2.78 (m, 1H), 2.62-2.59 (m, 1H), 1.19-0.94 (m, 12H); ³¹P-NMR (162 MHz, DMSO-d₆): δ=149.52, 148.82.

### Example 16. Synthesis of Monomer

[chemical structure]

[0513] Preparation of (5): To the solution of 4 (18.8 g, Scheme 5) in dry ACN (200 mL) was added TPSCl (16.8 g, 65.2 mmol) and TEA (5.6 g, 65.2 mmol) and DMAP (6.8 g, 65.2 mmol), and the reaction mixture was stirred at room temperature for 3.5 hrs under N₂ atmosphere. After addition of water, the resulting mixture was extracted with EA (300 mL). The combined organic layer was washed with water and brine, dried over Na₂SO₄, and concentrated to give the crude 5 (22.0 g) as a white solid which was used directly for next step. ESI-LCMS: m/z 677 [M−H]⁺.

[0514] Preparation of (6): To a solution of 5 (22.0 g) in pyridine (150 mL) was added BzCl (6.8 g, 48.9 mmol) under ice bath. The reaction mixture was stirred at r.t. for 2.5 hrs. LCMS showed 5 was consumed. The mixture was diluted with EA and water was added. The product was extracted with EA. The crude was purified by Flash-Prep-HPLC with the following conditions (IntelFlash-1): Column, C18 silica gel; mobile phase, CH₃CN/H₂O (0.5% NH₄HCO₃)=1/1 increasing to CH₃CN/H₂O (0.5% NH₄HCO₃)=1/0 within 25 min, the eluted product was collected at CH₃CN/H₂O (0.5% NH₄HCO₃)=1/0; Detector, UV 254 nm. This resulted in to give the crude 6 (20.8 g, 26.7 mmol, 82% yield over two steps) as a white solid. ESI-LCMS: m/z 781 [M+H]⁺; ¹H-NMR (400 MHz, DMSO-d₆): δ 11.30 (s, 1H), 8.55 (d, J=8.0 Hz, 1H), 8.00-7.98 (m, 2H), 7.74-7.66 (m, 1H), 7.60-7.50 (m, 2H), 7.47-7.31 (m, 4H), 7.30-7.2 (m, 5H), 7.20-7.1 (m, 1H), 6.91 (d, J=7.4 Hz, 4H), 5.91-5.86 (AB, J=20.0 Hz, 1H), 4.30 (d, J=8.0 Hz, 1H), 3.87-3.78 (s, 1H), 3.78-3.70 (m, 6H), 3.62-3.51 (m, 1H), 3.28-3.2 (m, 1H), 2.15-2.05 (m, 3H), 0.73 (s, 9H), 0.00 (m, 6H).

[0515] Preparation of (7): To a solution of 6 (20.8 g, 26.7 mmol) in THF (210 mL) was added 1 M TBAF solution (32 mL). The reaction mixture was stirred at r.t. for 1.5 hrs. LCMS showed 6 was consumed completely. Water (600 mL) was added. The product was extracted with EA (400 mL) and the organic layer was washed with brine and dried over Na₂SO₄. Then the organic layer was concentrated to give a residue which was purified by Flash-Prep-HPLC with the following conditions (IntelFlash-1): Column, C18 silica gel; mobile phase, CH₃CN/H₂O (0.5% NH₄HCO₃)=2/3 increasing to CH₃CN/H₂O (0.5% NH₄HCO₃)=3/2 within 20 min, the eluted product was collected at CH₃CN/H₂O (0.5% NH₄HCO₃)=1/1; Detector, UV 254 nm. This resulted in to give 7 (12.4 g, 18.6 mmol, 70%) as a white solid. ESI-LCMS: m/z 667 [M+H]⁺; ¹H-NMR (400 MHz, DMSO-d₆): δ 11.03 (m, 1H), 8.51-8.48 (m, 1H), 8.08-7.95 (m, 2H), 7.63-7.54 (m, 1H), 7.52-7.19 (m, 9H), 7.16-7.07 (m, 1H), 6.94-6.89 (m, 3H), 5.95-5.87 (m, 1H), 5.31-5.17 (m, 1H), 4.61-4.37 (m, 1H), 4.20-4.07 (m, 1H), 3.82-3.47 (m, 7H), 2.57-2.42 (m, 2H).

[0516] Preparation of Example 16 monomer: To a suspension of 7 (12.4 g, 18.6 mmol) in DCM (120 mL) was added DCI (1.7 g, 15.8 mmol) and CEP[N(iPr)₂]₂ (7.3 g, 24.2 mmol). The mixture was stirred at r.t. for 2 hrs. LC-MS showed 7 was consumed completely. The solution was washed with water twice and washed with brine and dried over Na₂SO₄. Then concentrated to give a residue which was purified by Flash-Prep-HPLC with the following conditions (IntelFlash-1): Column, C18 silica gel; mobile phase, CH₃CN/H₂O (0.5% NH₄HCO₃)=1/1 increasing to CH₃CN/H₂O (0.5% NH₄HCO₃)=1/0 within 20 min, the eluted product was collected at CH₃CN/H₂O (0.5% NH₄HCO₃)=1/0; Detector, UV 254 nm. This resulted in to give Example 16 monomer (13.6 g, 15.7 mmol, 84.0%) as a white solid. ESI-LCMS: m/z 867 [M+H]⁺; ¹H-NMR (400 MHz, DMSO-d₆): δ 11.03 (m, 1H), 8.51-8.48 (m, 1H), 8.08-7.95 (m, 2H), 7.63-7.54 (m, 1H), 7.52-7.19 (m, 9H), 7.16-7.07 (m, 1H), 6.94-6.89 (m, 3H), 5.95-5.87 (m, 1H), 5.31-5.17 (m, 1H), 4.61-4.37 (m, 1H), 4.20-4.07 (m, 1H), 3.82-3.47 (m, 10H), 2.74-2.59 (m, 1H), 2.57-2.43 (m, 1H), 1.27-1.10 (m, 9H), 1.09-0.95 (m, 3H). ³¹P-NMR (162 MHz, DMSO-d₆): δ 149.59, 148.85.

### Example 17. Synthesis of Monomer

[chemical structure]

[0517] Preparation of (4): To a solution of 3 (13.1 g, 35.2 mmol, Scheme 3) in pyridine (130 mL) was added MsCl (4.8 g, 42.2 mmol) under-10˜0° C. The reaction mixture was stirred at r.t. for 2.5 h under N₂ atmosphere. TLC (DCM/MeOH=15:1) showed the reaction was consumed. The mixture was diluted with EA and water was added. The product was extracted with EA. The organic layer was washed with brine and dried over Na₂SO₄ and concentrated to give the crude. This resulted in to give the product 4 (14.2 g) which was used directly for the next step. ESI-LCMS: m/z 451 [M+H]⁺; ¹H-NMR (400 MHz, DMSO-d₆) δ 11.43 (m, 1H), 7.67-7.65 (m, 1H), 5.90-5.80 (m, 1H), 5.75-5.64 (m, 1H), 4.52-4.21 (m, 3H), 4.12-3.90 (m, 2H), 3.48-3.21 (m, 6H), 0.95-0.78 (s, 9H), 0.13-0.03 (s, 6H).

[0518] Preparation of (5): To a solution of 4 (14.2 g) in DMSO (200 mL) was added DMTrSH (19.6 g, 63.2 mmol) and tetramethylguanidine (5.1 g, 47.4 mmol) at r.t. The reaction mixture was stirred at r.t. for 3.5 h under N₂ atmosphere. LCMS showed 4 the reaction was consumed. The mixture was diluted with EA and water was added. The product was extracted with EA. The organic layer was washed with brine and dried over Na₂SO₄ and concentrated to give the crude. The crude was purified by silica gel column (SiO₂, PE/EA=10:1˜1:1) to give 5 (14.2 g, 20.6 mmol, 58.5% yield over two steps) as a white solid. ESI-LCMS: m/z 689 [M+H]⁻; ¹H-NMR (400 MHz, DMSO-d₆) δ 11.39 (m, 1H), 7.63-7.61 (d, J=8.0 Hz, 1H), 7.45-7.1 (m, 9H), 6.91-6.81 (m, 4H), 5.80-5.70 (m, 2H), 4.01-3.91 (m, 1H), 3.85-3.78 (m, 1H), 3.78-3.65 (m, 6H), 3.60-3.51 (m, 1H), 3.43-3.2 (m, 3H), 2.50-2.32 (m, 2H), 0.95-0.77 (s, 9H), −0.00-0.02 (s, 6H).

[0519] Preparation of (6): To a solution of 5 (14.2 g, 20.6 mmol) in THF (140 mL) was added 1 M TBAF solution (20 mL). The reaction mixture was stirred at r.t. under N₂ atmosphere for 2.5 h. LCMS showed 5 was consumed completely. Water was added. The product was extracted with EA and the organic layer was washed with brine and dried over Na₂SO₄. Then the organic layer was concentrated to give a residue which was purified by Flash-Prep-HPLC with the following conditions (IntelFlash-1): Column, C18 silica gel; mobile phase, CH₃CN/H₂O (0.5% NH₄HCO₃)=2/3 increasing to CH₃CN/H₂O (0.5% NH₄HCO₃)=3/2 within 20 min, the eluted product was collected at CH₃CN/H₂O (0.5% NH₄HCO₃)=1/1; Detector, UV 254 nm. This resulted in to give 6 (10.5 g, 18.2 mmol, 88.5%) as a white solid. ESI-LCMS: m/z 576 [M+H]⁺; ¹H-NMR (400 MHz, DMSO-d₆) δ 11.38 (m, 1H), 7.56-7.54 (d, J=8.0 Hz, 1H), 7.45-7.1 (m, 9H), 6.91-6.81 (m, 4H), 5.80-5.70 (m, 2H), 4.05-4.00 (m, 1H), 3.81-3.79 (m, 1H), 3.74 (m, 2H), 3.78-3.65 (m, 6H), 3.60-3.51 (m, 1H), 3.43-3.2 (m, 3H), 2.40-2.32 (m, 1H).

[0520] Preparation of Example 17 monomer: To a suspension of 9 (10.5 g, 18.2 mmol) in DCM (100 mL) was added DCI (1.7 g, 15.5 mmol) and CEP[N(iPr)₂]₂ (7.2 g, 23.7 mmol). The mixture was stirred at r.t. for 1 h. LC-MS showed 9 was consumed completely. The solution was washed with water twice and washed with brine and dried over Na₂SO₄. Then concentrated to give a residue which was purified by Flash-Prep-HPLC with the following conditions (IntelFlash-1): Column, C18 silica gel; mobile phase, CH₃CN/H₂O (0.5% NH₄HCO₃)=1/1 increasing to CH₃CN/H₂O (0.5% NH₄HCO₃)=1/0 within 20 min, the eluted product was collected at CH₃CN/H₂O (0.5% NH₄HCO₃)=1/0; Detector, UV 254 nm. This resulted in to give Example 17 monomer (12.5 g, 16.1 mmol, 88%) as a white solid. ESI-LCMS: m/z 776 [M+H]⁺; ¹H-NMR (400 MHz, DMSO-d₆) δ 11.41 (m, 1H), 7.64-7.59 (m, 1H), 7.40-7.25 (m, 4H), 7.25-7.10 (m, 5H), 6.89-6.86 (m, 4H), 5.72-5.67 (m, 2H), 4.02-4.00 (m, 2H), 3.76-3.74 (m, 8H), 3.74-3.73 (m, 3H), 3.51-3.49 (d, J=8 Hz, 1H), 3.33-3.29 (m, 1H), 2.77-2.73 (m, 1H), 2.63-2.60 (m, 1H), 2.50-2.47 (m, 1H), 1.12-0.99 (m, 12H). ³¹P-NMR (162 MHz, DMSO-d₆): δ 148.92, 148.84.

### Example 18. Synthesis of Monomer

[chemical structure]

[0521] Preparation of (7): To a solution of 6 (16 g, 24.1 mmol, Scheme 4) in ACN (160 mL) was added DMAP (5.9 g, 48.2 mmol) and TEA (4.8 g, 48.2 mmol), then added TPSCl (10.9 g, 36.1 mmol) at 0° C. under N₂ atmosphere and the mixture was stirred at r.t. for 5 hrs under N₂ atmosphere. Then con. NH₃·H₂O (30 mL) was added at r.t. and the mixture was stirred at r.t. for 16 h. The reaction was quenched with water and the product was extracted with EA (200 mL). The organic phase was concentrated to give the crude 7 (16.0 g) as a white solid which was used directly for next step.

[0522] Preparation of (8): To a stirred solution of 7 (16.0 g, 24.1 mmol) in pyridine (160 mL) were added BzCl (4.1 g, 28.9 mmol) 0° C. under N₂ atmosphere. And the reaction mixture was stirred at r.t. for 2.5 h. With ice-bath cooling, the reaction was quenched with water and the product was extracted with EA (200 mL). The organic phase was evaporated to dryness under reduced pressure to give a residue which was purified by Flash-Prep-HPLC with the following conditions (IntelFlash-1): Column, C18 silica gel; mobile phase, CH₃CN/H₂O (0.5% NH₄HCO₃)=1/1 increasing to CH₃CN/H₂O (0.5% NH₄HCO₃)=1/0 within 20 min, the eluted product was collected at CH₃CN/H₂O (0.5% NH₄HCO₃)=1/0; Detector, UV 254 nm. This resulted in to give 8 (18.0 g, 23.4 mmol, 97.0%) as a white solid. ESI-LCMS: m/z 768 [M+H]⁺; ¹H-NMR (400 MHz, DMSO-d₆): δ 11.31 (s, 1H), 8.47 (d, J=7.2 Hz, 1H), 7.99 (d, J=7.6 Hz, 2H), 7.65-7.16 (m, 13H), 6.92 (d, J=8.8 Hz, 4H), 6.01 (d, J=18.4 Hz, 1H), 5.18-5.04 (dd, 1H), 4.58-4.52 (m, 1H), 4.07 (d, J=9.6 Hz, 1H), 3.75 (s, 6H), 0.73 (s, 9H), 0.05 (s, 3H), −0.06 (s, 3H).

[0523] Preparation of (9): To a solution of 8 (18.0 g, 23.4 mmol) in THF (180 mL) was added 1 M TBAF solution (23 mL). The reaction mixture was stirred at r.t. for 1.5 h. LC-MS showed 8 was consumed completely. Water (500 mL) was added. The product was extracted with EA (300 mL) and the organic layer was washed with brine and dried over Na₂SO₄. Then the organic layer was concentrated to give a residue which was purified by Flash-Prep-HPLC with the following conditions (IntelFlash-1): Column, C18 silica gel; mobile phase, CH₃CN/H₂O (0.5% NH₄HCO₃)=2/3 increasing to CH₃CN/H₂O (0.5% NH₄HCO₃)=3/2 within 20 min, the eluted product was collected at CH₃CN/H₂O (0.5% NH₄HCO₃)=1/1; Detector, UV 254 nm. This resulted in to give 7 (13.7 g, 21.1 mmol, 90.5%) as a white solid. ESI-LCMS: m/z 654.2 [M+H]⁺; ¹H-NMR (400 MHz, DMSO-d₆): δ 11.31 (s, 1H), 8.35 (d, J=7.4 Hz, 1H), 8.01 (m, 2H), 7.65-7.16 (m, 13H), 6.92 (d, J=8.8 Hz, 4H), 5.94 (d, J=18.0 Hz, 1H), 5.71 (d, J=7.0 Hz, 1H), 5.12-4.98 (dd, 1H), 4.51-4.36 (m, 1H), 4.09 (d, J=9.6 Hz, 1H), 3.75 (s, 6H).

[0524] Preparation of Example 18 monomer: To a suspension of 9 (10.6 g, 16.2 mmol) in DCM (100 mL) was added DCI (1.6 g, 13.7 mmol) and CEP[N(iPr)₂]₂ (5.8 g, 19.4 mmol). The mixture was stirred at r.t. for 1 h. LC-MS showed 9 was consumed completely. The solution was washed with water twice and washed with brine and dried over Na₂SO₄. Then concentrated to give a residue which was purified by Flash-Prep-HPLC with the following conditions (IntelFlash-1): Column, C18 silica gel; mobile phase, CH₃CN/H₂O (0.5% NH₄HCO₃)=1/1 increasing to CH₃CN/H₂O (0.5% NH₄HCO₃)=1/0 within 20 min, the eluted product was collected at CH₃CN/H₂O (0.5% NH₄HCO₃)=1/0; Detector, UV 254 nm. This resulted in to give Example 18 monomer (10.5 g, 14.5 mmol, 75.9%) as a white solid. ESI-LCMS: m/z 854.3 [M+H]⁺; ¹H-NMR (400 MHz, DMSO-d₆): δ 11.31 (s, 1H), 8.41-8.37 (m, 1H), 8.01 (d, J=7.7 Hz, 2H), 7.65-7.16 (m, 13H), 6.92-6.88 (m, 4H), 6.06-5.98 (m, 1H), 5.33-5.15 (m, 1H), 4.78-4.58 (m, 1H), 4.23-4.19 (m, 1H), 3.81-3.73 (m, 6H), 3.60-3.50 (m, 3H), 3.32 (s, 1H), 2.76 (t, J=6.0 Hz, 1H), 2.60 (t, J=5.8 Hz, 1H), 1.15-0.94 (m, 12H); ³¹P-NMR (162 MHz, DMSO-d₆): δ 150.23, 150.18, 149.43, 149.38.

### Example 19. Synthesis of Monomer

[chemical structure]

[0525] Preparation of (9): To a solution of 8 (18.8 g, 26.4 mmol, Scheme 5) in ACN (200 mL) was added TPSCl (16.8 g, 55.3 mmol) and DMAP (5.6 g, 55.3 mmol) and TEA (6.8 g, 55.3 mmol). The reaction mixture was stirred at r.t. for 3.5 hrs. LCMS showed the reaction was consumed. The mixture was diluted with con. NH₄OH (28 mL). The mixture was diluted with water and EA. The product was extracted with EA. The organic layer was washed with brine and dried over Na₂SO₄ and concentrated to give the crude 9 (18.5 g) which was used directly for the next step.

[0526] Preparation of (10): To a solution of 9 (18.8 g, 27.69 mmol) in pyridine (200 mL) was added BzCl (5.8 g, 41.5 mmol) under ice bath. The reaction mixture was stirred at r.t. for 2.5 hrs. LCMS showed 9 was consumed. The mixture was diluted with EA and water was added. The product was extracted with EA. The crude was purified by Flash-Prep-HPLC with the following conditions (IntelFlash-1): Column, C18 silica gel; mobile phase,

[0527] CH₃CN/H₂O (0.5% NH₄HCO₃)=1/1 increasing to CH₃CN/H₂O (0.5% NH₄HCO₃)=1/0 within 25 min, the eluted product was collected at CH₃CN/H₂O (0.5% NH₄HCO₃)=1/0; Detector, UV 254 nm. This resulted in to give 10 (19.8 g, 25.3 mmol, 91% yield) as a white solid. ESI-LCMS: m/z 783 [M−H]⁻; ¹H-NMR (400 MHz, DMSO-d₆): δ 11.29 (d, J=2.0 Hz, 1H), 8.42 (d, J=8.0 Hz, 1H), 8.02-8.00 (m, 2H), 7.64-7.62 (m, 1H), 7.60-7.41 (m, 2H), 7.47.41-7.19 (m, 9H), 6.94-6.85 (m, 4H), 5.81 (d, J=4.0 Hz, 1H), 5.33-5.26 (m, 1H), 5.21 (d, J=7.2 Hz, 1H), 4.06-3.90 (m, 2H), 3.83-3.77 (m, 1H), 3.74 (s, 6H).

[0528] Preparation of (11): To a solution of 10 (18.8 g, 26.4 mmol) in THF (190 mL) was added 1 M TBAF solution (28 mL). The reaction mixture was stirred at r.t. for 1.5 hrs. LCMS showed 10 was consumed completely. Water (200 mL) was added. The product was extracted with EA (200 mL) and the organic layer was washed with brine and dried over Na₂SO₄. Then the organic layer was concentrated to give a residue which was purified by Flash-Prep-HPLC with the following conditions (IntelFlash-1): Column, C18 silica gel; mobile phase, CH₃CN/H₂O (0.5% NH₄HCO₃)=2/3 increasing to CH₃CN/H₂O (0.5% NH₄HCO₃)=3/2 within 20 min, the eluted product was collected at CH₃CN/H₂O (0.5% NH₄HCO₃)=1/1; Detector, UV 254 nm. This resulted in to give 11 (17.1 g, 25.6 mmol, 96%) as a white solid. ESI-LCMS: m/z 669 [M−H]⁻; ¹H-NMR (400 MHz, DMSO-d₆): δ 11.29 (d, J=2.0 Hz, 1H), 8.42 (d, J=8.0 Hz, 1H), 8.02-8.00 (m, 2H), 7.64-7.62 (m, 1H), 7.60-7.41 (m, 2H), 7.47.41-7.19 (m, 9H), 6.94-6.85 (m, 4H), 5.81 (d, J=4.0 Hz, 1H), 5.33-5.26 (m, 1H), 5.21 (d, J=7.2 Hz, 1H), 4.06-3.90 (m, 2H), 3.83-3.77 (m, 1H), 3.74 (s, 6H).

[0529] Preparation of Example 19 monomer: To a suspension of 11 (10.8 g, 16.2 mmol) in DCM (100 mL) was added DCI (1.5 g, 13.7 mmol) and CEP[N(iPr)₂]₂ (5.8 g, 19.3 mmol). The mixture was stirred at r.t. for 2 hrs. LC-MS showed 11 was consumed completely. The solution was washed with water twice and washed with brine and dried over Na₂SO₄. Then concentrated to give a residue which was purified by Flash-Prep-HPLC with the following conditions (IntelFlash-1): Column, C18 silica gel; mobile phase, CH₃CN/H₂O (0.5% NH₄HCO₃)=1/1 increasing to CH₃CN/H₂O (0.5% NH₄HCO₃)=1/0 within 20 min, the eluted product was collected at CH₃CN/H₂O (0.5% NH₄HCO₃)=1/0; Detector, UV 254 nm. This resulted in to give Example 19 monomer (11.3 g, 13 mmol, 80%) as a white solid. ESI-LCMS: m/z 868 [M+H]⁺; ¹H-NMR (400 MHz, DMSO-d₆): δ 11.03 (m, 1H), 8.51-8.48 (m, 1H), 8.08-7.95 (m, 2H), 7.63-7.54 (m, 1H), 7.52-7.19 (m, 9H), 7.16-7.07 (m, 1H), 6.94-6.89 (m, 3H), 5.95-5.87 (m, 1H), 5.31-5.17 (m, 1H), 4.61-4.37 (m, 1H), 4.20-4.07 (m, 1H), 3.82-3.47 (m, 10H), 2.74-2.59 (m, 1H), 2.57-2.43 (m, 1H), 1.27-1.10 (m, 9H), 1.09-0.95 (m, 3H). ³¹P-NMR (162 MHz, DMSO-d₆): δ 149.52, 148.81.

### Example 20. Synthesis of Monomer

[chemical structure]

[0530] Preparation of (2): To a stirred solution of 1 (100.0 g, 406.5 mmol) in pyridine (1000 mL) were added DMTrCl (151.2 g, 447.1 mmol) at r.t. And the reaction mixture was stirred at r.t. for 2.5 hrs. With ice-bath cooling, the reaction was quenched with water and the product was extracted with EA (3000 mL). The organic phase was evaporated to dryness under reduced pressure to give a residue which was purified by silica gel column chromatography (SiO₂, dichloromethane:methanol=100:1) to give 2 (210.0 g, 90%) as a white solid. ESI-LCMS: m/z 548.2 [M+H]⁺; ¹H-NMR (400 MHz, DMSO-d₆): δ 11.43 (d, J=1.8 Hz, 1H), 7.77 (d, J=8.0 Hz, 1H), 7.40-7.21 (m, 9H), 6.92-6.88 (m, 4H), 5.89 (d, J=20.0 Hz, 1H), 5.31-5.29 (m, 1H), 5.19-5.04 (dd, 1H), 4.38-4.31 (m, 1H), 4.02-3.98 (m, 1H), 3.74 (s, 6H), 3.30 (d, J=3.2 Hz, 2H); ¹⁹F-NMR (376 MHz, DMSO-d₆): δ −199.51.

[0531] Preparation of (3): To a stirred solution of 2 (100.0 g, 182.8 mmol) in pyridine (1000 mL) were added MsCl (31.2 g, 274.2 mmol) at 0° C. under N₂ atmosphere. And the reaction mixture was stirred at r.t for 2.5 h. With ice-bath cooling, the reaction was quenched with water and the product was extracted with EA (200 mL). The organic phase was evaporated to dryness under reduced pressure to give the crude (114.0 g) as a white solid which was used directly for next step. To the solution of the crude (114.0 g, 187.8 mmol) in DMF (2000 mL) was added K₂CO₃ (71.5 g, 548.4 mmol), and the reaction mixture was stirred at 90° C. for 15 h under N₂ atmosphere. After addition of water, the resulting mixture was extracted with EA (500 mL). The combined organic layer was washed with water and brine, dried over Na₂SO₄, and concentrated to give a residue which was purified by silica gel column chromatography (SiO₂, dichloromethane:methanol=30:1) to give 3 (100.0 g, 90%) as a white solid. ESI-LCMS: m/z 531.2 [M+H]⁺; ¹H-NMR (400 MHz, DMSO-d₆): δ 7.79 (d, J=8.0 Hz, 1H), 7.40-7.21 (m, 9H), 6.89-6.83 (m, 4H), 6.14 (d, J=5.4 Hz, 1H), 6.02-5.90 (dd, 1H), 5.87 (d, J=20.0 Hz, 1H), 5.45 (m, 1H), 4.61 (m, 1H), 3.73 (d, J=1.9 Hz, 6H), 3.30-3.15 (m, 2H), 1.24-1.16 (m, 1H); ¹⁹F-NMR (376 MHz, DMSO-d₆): δ −204.23.

[0532] Preparation of (4): A solution of 3 (100 g, 187.8 mmol) in THF (1000 mL) was added 6N NaOH (34 mL, 206.5 mmol). The mixture was stirred at r.t. for 6 h. After completion of reaction, the resulting mixture was added H₂O, and then the mixture was extracted with EA, the organic layer was washed with brine, dried over sodium sulfate and removed to give the residue was purified by silica gel column chromatography (SiO₂, dichloromethane:methanol=30:1) to give 4 (90.4 g, 90%) as a white solid. ESI-LCMS: m/z 548.2 [M+H]⁺; ¹⁹F-NMR (376 MHz, DMSO-d₆): δ −184.58.

[0533] Preparation of (5): To a stirred solution of 4 (90.4 g, 165.2 mmol) in pyridine (1000 mL) were added MsCl (61.5 g, 495.6 mmol) at 0° C. under N₂ atmosphere. And the reaction mixture was stirred at r.t for 16 hrs. With ice-bath cooling, the reaction was quenched with water and the product was extracted with EA. the organic layer was washed with brine, dried over sodium sulfate and removed to give the residue was purified by silica gel column chromatography (SiO₂, PE:EA=1:1) to give 5 (75.0 g, 90%) as a white solid. ESI-LCMS: m/z 626.2 [M+H]⁺; ¹H-NMR (400 MHz, DMSO-d₆): δ 11.51 (d, J=1.6 Hz, 1H), 7.43-7.23 (m, 10H), 6.92-6.88 (m, 4H), 6.08 (d, J=20.0 Hz, 1H), 5.55-5.39 (m, 2H), 4.59 (m, 1H), 3.74 (s, 6H), 3.48-3.28 (m, 2H), 3.17 (s, 3H); ¹⁹F-NMR (376 MHz, DMSO-d₆): δ −187.72.

[0534] Preparation of (6): To the solution of 5 (75.0 g, 120.4 mmol) in DMF (1500 mL) was added KSAc (71.5 g, 548.4 mmol) at 110° C. under N₂ atmosphere, After the reaction mixture was stirred at 110° C. for 3 h were added KSAc (71.5 g, 548.4 mmol) under N₂ atmosphere. And the reaction mixture was stirred at r.t for 16 h. After addition of water, the resulting mixture was extracted with EA. The combined organic layer was washed with water and brine, dried over Na₂SO₄, and concentrated to give a residue which was purified by silica gel column chromatography (SiO₂, PE:EA=1:1) to give 6 (29.0 g, 90%) as a white solid. ESI-LCMS: m/z 605.2 [M+H]⁺; ¹H-NMR (400 MHz, DMSO-d₆): δ 11.45 (d, J=1.9 Hz, 1H), 7.95 (d, J=8.0 Hz, 1H), 7.38-7.21 (m, 9H), 6.92-6.87 (m, 4H), 5.93 (m, 1H), 5.50-5.36 (dd, 1H), 5.25-5.23 (dd, 1H), 4.54-4.42 (m, 1H), 4.17-4.12 (m, 1H), 3.74 (m, 7H), 3.35-3.22 (m, 2H), 2.39 (s, 1H); ¹⁹F-NMR (376 MHz, DMSO-d₆): δ −181.97.

[0535] Preparation of (7): A solution of 6 (22 g, 36.3 mmol) in a mixture solvent of THF/MeOH (1:1, 200 mL) was added IN NaOMe (70 mL, 72.6 mmol) was stirred at 20° C. for 4 h. After completion of reaction, the resulting mixture was added H₂O, and then the mixture was extracted with EA, the organic layer was washed with brine, dried over sodium sulfate and removed to give the residue was purified by Flash-Prep-HPLC with the following conditions (IntelFlash-1): Column, C18 silica gel; mobile phase, CH₃CN/H₂O (0.5% NH₄HCO₃)=2/3 increasing to CH₃CN/H₂O (0.5% NH₄HCO₃)=3/2 within 25 min, the eluted product was collected at CH₃CN/H₂O (0.5% NH₄HCO₃)=4/3; Detector, UV 254 nm. This resulted in to give 7 (10.5 g, 14.5 mmol, 75.9%) as a white solid. ESI-LCMS: m/z 565.1 [M+H]⁺; ¹H-NMR (400 MHz, DMSO-d₆): δ 11.45 (s, 1H), 7.83 (d, J=8.0 Hz, 1H), 7.40-7.23 (m, 9H), 6.90 (d, J=8.8 Hz, 4H), 5.88 (m, 1H), 5.29-5.15 (m, 2H), 3.72 (m, 7H), 3.43 (m, 2H), 2.78 (d, J=10.6 Hz, 1H).

[0536] Preparation of Example 20 monomer: To a suspension of 7 (10.5 g, 18.6 mmol) in DCM (100 mL) was added DCI (1.8 g, 15.7 mmol) and CEP[N(iPr)₂]₂ (6.7 g, 22.3 mmol). The mixture was stirred at r.t. for 1 h. LC-MS showed 8 was consumed completely. The solution was washed with water twice and washed with brine and dried over Na₂SO₄. Then concentrated to give a residue which was purified by Flash-Prep-HPLC with the following conditions (IntelFlash-1): Column, C18 silica gel; mobile phase, CH₃CN/H₂O (0.5% NH₄HCO₃)=1/1 increasing to CH₃CN/H₂O (0.5% NH₄HCO₃)=1/0 within 20 min, the eluted product was collected at CH₃CN/H₂O (0.5% NH₄HCO₃)=1/0; Detector, UV 254 nm. This resulted in to give Example 20 monomer (10.5 g, 14.5 mmol, 75.9%) as a white solid. ESI-LCMS: m/z 765.3 [M+H]⁺; ¹H-NMR (400 MHz, DMSO-d₆): δ 11.40 (d, J=12.2 Hz, 1H), 7.90-7.86 (m, 1H), 7.41-7.24 (m, 9H), 6.91-6.89 (m, 4H), 5.97 (m, 1H), 5.33-5.10 (m, 2H), 4.18-4.16 (m, 1H), 3.91-3.39 (m, 17H), 2.81 (t, J=5.6 Hz, 1H), 2.66 (t, J=6.0 Hz, 1H), 1.33-0.97 (m, 12H); ³¹P-NMR (162 MHz, DMSO-d₆): δ 164.57, 160.13.

### Example 21. Synthesis of Monomer

[chemical structure]

[0537] Preparation of (2): To a stirred solution of 1 (100.0 g, 387.5 mmol) in pyridine (1000 mL) was added DMTrCl (151.2 g, 447.1 mmol) at r.t. And the reaction mixture was stirred at r.t. for 2.5 hrs. With ice-bath cooling, the reaction was quenched with water and the product was extracted with EA (3000 mL). The organic phase was evaporated to dryness under reduced pressure to give a residue which was purified by silica gel column chromatography (SiO₂, dichloromethane:methanol=100:1) to give 2 (200.0 g, 90%) as a white solid. ESI-LCMS: m/z 561 [M+H]⁺.

[0538] Preparation of (3): To a stirred solution of 2 (73.0 g, 130.3 mmol) in pyridine (730 mL) were added MsCl (19.5 g, 169.2 mmol) at 0° C. under N₂ atmosphere. And the reaction mixture was stirred at r.t for 2.5 h. With ice-bath cooling, the reaction was quenched with water and the product was extracted with EA (200 mL). The organic phase was evaporated to dryness under reduced pressure to give the crude (80.0 g) as a white solid which was used directly for next step. To the solution of the crude (80.0 g, 130.3 mmol) in DMF (1600 mL) was added K₂CO₃ (71.5 g, 390.9 mmol), and the reaction mixture was stirred at 90° C. for 15 h under N₂ atmosphere. After addition of water, the resulting mixture was extracted with EA (500 mL). The combined organic layer was washed with water and brine, dried over Na₂SO₄, and concentrated to give a residue which was purified by silica gel column chromatography (SiO₂, dichloromethane:methanol=30:1) to give 3 (55.0 g, 90%) as a white solid. ESI-LCMS: m/z 543. [M+H]⁺; ¹H-NMR (400 MHz, DMSO-d₆): δ 7.68 (d, J=8.0 Hz, 1H), 7.40-7.21 (m, 9H), 6.89-6.83 (m, 4H), 5.96 (s, 1H), 5.83 (d, J=5.4 Hz, 1H), 5.26 (s, 1H), 4.59 (s, 1H), 4.46 (t, J=6.0 Hz, 1H), 3.72 (s, 6H), 3.44 (s, 3H), 3.18-3.12 (m, 2H).

[0539] Preparation of (4): A solution of 3 (55 g, 101.8 mmol) in THF (550 mL) was added 6N NaOH (34 mL, 206.5 mmol). The mixture was stirred at 20° C. for 6 hrs. After completion of reaction, the resulting mixture was added H₂O, and then the mixture was extracted with EA, the organic layer was washed with brine, dried over sodium sulfate and removed to give the residue was purified by silica gel column chromatography (SiO₂, dichloromethane:methanol=30:1) to give 4 (57.4 g, 87%) as a white solid. ESI-LCMS: m/z 561 [M+H]⁺.

[0540] Preparation of (5): To a stirred solution of 4 (57.4 g, 101.8 mmol) in pyridine (550 mL) were added MsCl (61.5 g, 495.6 mmol) at 0° C. under N₂ atmosphere. And the reaction mixture was stirred at r.t for 16 h. With ice-bath cooling, the reaction was quenched with water and the product was extracted with EA. the organic layer was washed with brine, dried over sodium sulfate and removed to give the residue was purified by silica gel column chromatography (SiO₂, PE:EA=1:1) to give 5 (57.0 g, 90%) as a white solid. ESI-LCMS: m/z 639 [M+H]⁺.

[0541] Preparation of (6): To the solution of 5 (57.0 g, 89.2 mmol) in DMF (600 mL) was added KSAc (71.5 g, 448.4 mmol) at 110° C. under N₂ atmosphere, After the reaction mixture was stirred at 110° C. for 3 h were added KSAc (71.5 g, 448.4 mmol) under N₂ atmosphere. And the reaction mixture was stirred at r.t for 16 h. After addition of water, the resulting mixture was extracted with EA. The combined organic layer was washed with water and brine, dried over Na₂SO₄, and concentrated to give a residue which was purified by silica gel column chromatography (SiO₂, PE:EA=1:1) to give 6 (29.0 g, 47%) as a white solid. ESI-LCMS: m/z 619.2 [M+H]⁺; ¹H-NMR (400 MHz, DMSO-d₆): δ 11.41 (s, 1H), 8.06 (s, 1H), 7.40-7.23 (m, 9H), 6.90 (d, J=8.8 Hz, 4H), 5.82 (s, 1H), 5.10-5.08 (dd, 1H), 4.38-4.34 (m, 1H), 4.08-4.02 (m, 3H), 3.74 (s, 6H), 3.45 (s, 3H), 3.25 (m, 2H), 2.37 (s, 3H); ESI-LCMS: m/z 619 [M+H]⁺.

[0542] Preparation of (7): A solution of 6 (22 g, 35.3 mmol) in a mixture solvent of THF/MeOH (1:1, 200 mL) was added IN NaOMe (70 mL, 72.6 mmol) was stirred at 20° C. for 4 h. After completion of reaction, the resulting mixture was added H₂O, and then the mixture was extracted with EA, the organic layer was washed with brine, dried over sodium sulfate and removed to give the residue was purified by Flash-Prep-HPLC with the following conditions (IntelFlash-1): Column, C18 silica gel; mobile phase, CH₃CN/H₂O (0.5% NH₄HCO₃)=2/3 increasing to CH₃CN/H₂O (0.5% NH₄HCO₃)=3/2 within 25 min, the eluted product was collected at CH₃CN/H₂O (0.5% NH₄HCO₃)=4/3; Detector, UV 254 nm. This resulted in to give 7 (14.0 g, 70.9%) as a white solid. ESI-LCMS: m/z 576.1 [M+H]⁺; ¹H-NMR (400 MHz, DMSO-d₆): δ 11.38 (s, 1H), 7.90 (d, J=8.0 Hz, 1H), 7.40-7.23 (m, 9H), 6.90 (d, J=8.8 Hz, 4H), 5.80 (s, 1H), 5.15-5.13 (dd, 1H), 3.93 (m, 1H), 3.87 (d, J=5.0 Hz, 1H), 3.74 (s, 6H), 3.59 (m, 2H), 3.49 (s, 3H), 3.39 (d, J=2.2 Hz, 2H), 2.40 (d, J=10.2 Hz, 1H).

[0543] Preparation of Example 21 monomer: To a suspension of 7 (10.5 g, 18.6 mmol) in DCM (100 mL) was added DCI (1.8 g, 15.7 mmol) and CEP[N(iPr)₂]₂ (6.7 g, 22.3 mmol). The mixture was stirred at r.t. for 1 h. LC-MS showed 7 was consumed completely. The solution was washed with water twice and washed with brine and dried over Na₂SO₄. Then concentrated to give a residue which was purified by Flash-Prep-HPLC with the following conditions (IntelFlash-1): Column, C18 silica gel; mobile phase, CH₃CN/H₂O (0.5% NH₄HCO₃)=1/1 increasing to CH₃CN/H₂O (0.5% NH₄HCO₃)=1/0 within 20 min, the eluted product was collected at CH₃CN/H₂O (0.5% NH₄HCO₃)=1/0; Detector, UV 254 nm. This resulted in to give Example 21 monomer (10.5 g, 14.5 mmol, 75.9%) as a white solid. ESI-LCMS: m/z 776.3 [M+H]⁺; ¹H-NMR (400 MHz, DMSO-d₆): δ 11.40 (d, J=12.2 Hz, 1H), 8.04-7.96 (dd, 1H), 7.43-7.24 (m, 9H), 6.92-6.87 (m, 4H), 5.84 (m, 1H), 4.93 (m, 1H), 4.13 (m, 1H), 3.91-3.39 (m, 17H), 2.82 (t, J=5.6 Hz, 1H), 2.68 (t, J=6.0 Hz, 1H), 1.22-0.97 (m, 12H); ³¹P-NMR (162 MHz, DMSO-d₆): δ 165.06, 157.59.

### Example 22. Synthesis of 5′ End Cap Monomer

[chemical structure]

[0544] Preparation of (2): To a solution of 1 (11.2 g, 24.7 mmol) in DCM (120 mL), imidazole (4.2 g, 61.9 mmol) and TBSCl (5.6 g, 37.1 mmol) were added at r.t., mixture was stirred at r.t. for 15 hrs, LCMS showed 1 was consumed completely. Mixture was added water (500 mL) and extracted with DCM (50 mL*2). The organic phase was dried over Na₂SO₄ and concentrated to give 2 (16.0 g) as an oil for the next step.

[0545] Preparation of (3): To a solution of 2 (16.0 g, 28.4 mmol) was added 6% DCA in DCM (160 mL) and triethylsilane (40 mL) at r.t. The reaction mixture was stirred at r.t. for 2 hrs. TLC showed 2 was consumed completely. Water (300 mL) was added, mixture was extracted with DCM (50 mL*4), organic phase was dried by Na₂SO₄, concentrated by reduce pressure to give crude which was purified by column chromatography (SiO₂, PE/EA=10:1 to 1:1) to give 3 (4.9 g, 65.9% yield) as an oil. ESI-LCMS: m/z 263 [M+H]⁺; ¹H-NMR (400 MHz, DMSO-d₆) δ 4.84-4.50 (m, 1H), 4.3-4.09 (m, 1H), 3.90-3.80 (m, 1H), 3.75-3.67 (m, 1H), 3.65-3.57 (m, 2H), 3.50-3.44 (m, 1H), 3.37-3.28 (m, 4H), 0.95-0.78 (s, 9H), 0.13-0.03 (s, 6H).

[0546] Preparation of (4): To a solution of 3 (3.3 g, 12.6 mmol) in DMSO (33 mL) was added EDCI (7.2 g, 37.7 mmol). The mixture was added pyridine (1.1 g, 13.8 mmol) and TFA (788.6 mg, 6.9 mmol). The reaction mixture was stirred at r.t. for 3 hrs. TLC (PE/EA=4:1) showed 3 was consumed. The mixture was diluted with EA and water was added. The product was extracted with EA. The organic layer was washed with brine and dried over Na₂SO₄ and concentrated to give the crude. This resulted in to give 4 (3.23 g) as an oil for the next step.

[0547] Preparation of (5): To a solution of 4 (3.3 g, 12.6 mmol) in toluene (30 mL) was added POM ester 4a (reference for 4a Journal of Medicinal Chemistry, 2018, 61 (3), 734-744) (7.9 g, 12.6 mmol) and KOH (1.3 g, 22.6 mmol) at r.t. The reaction mixture was stirred at 40° C. for 8 hrs. LCMS showed 4 was consumed. The mixture was diluted with water and EA was added. The product was extracted with EA. The organic layer was washed with brine and dried over Na₂SO₄ and concentrated to give the crude. The crude was purified by Flash-Prep-HPLC with the following conditions (IntelFlash-1): Column, C18 silica gel; mobile phase, CH₃CN/H₂O (0.5% NH₄HCO₃)=1/1 increasing to CH₃CN/H₂O (0.5% NH₄HCO₃)=1/0 within 20 min, the eluted product was collected at CH₃CN/H₂O (0.5% NH₄HCO₃)=91/9 Detector, UV 254 nm. This resulted in to give 5 (5.4 g, 9.5 mmol, 75.9% yield) as an oil. ESI-LCMS: m/z 567.2 [M+H]⁺; ¹H-NMR (400 MHz, CDCl₃) δ 6.89-6.77 (m, 1H), 6.07-5.96 (m, 1H), 5.86-5.55 (m, 4H), 4.85-4.73 (m, 1H), 4.36-4.27 (m, 1H), 4.05-3.96 (m, 1H), 3.95-3.85 (m, 1H), 3.73-3.65 (m, 1H), 3.44-3.35 (m, 3H), 1.30-1.25 (s, 18H), 0.94-0.84 (s, 9H), 0.14-0.05 (s, 6H). ³¹P-NMR (162 MHz, CDCl₃) δ 18.30, 15.11.

[0548] Preparation of (6): To a solution of 5 (5.4 g, 9.5 mmol) in HCOOH (30 mL)/H₂O (30 mL)=1:1 at r.t. The reaction mixture was stirred at r.t. for 15 hrs. LCMS showed the reaction was consumed. The mixture was diluted with con. NH₄OH till pH=7.5. The product was extracted with EA. The organic layer was washed with brine and dried over Na₂SO₄ and concentrated to give the crude. The crude was purified by Flash-Prep-HPLC with the following conditions (IntelFlash-1): Column, C18 silica gel; mobile phase, CH₃CN/H₂O (0.5% HCOOH)=30/70 increasing to CH₃CN/H₂O (0.5% HCOOH)=70/30 within 45 min, the eluted product was collected at CH₃CN/H₂O (0.5% HCOOH)=59/41 Detector, UV 220 nm. This resulted in to give 6 (2.4 g, 5.7 mmol, 59.4% yield) as an oil. ESI-LCMS: m/z 453.2 [M+H]⁺; ¹H-NMR (400 MHz, DMSO-d₆) δ 6.84-6.68 (m, 1H), 6.07-5.90 (m, 1H), 5.64-5.55 (m, 4H), 5.32-5.24 (m, 1H), 4.23-4.15 (m, 1H), 4.00-3.90 (m, 1H), 3.89-3.80 (m, 1H), 3.78-3.69 (m, 2H), 3.37-3.30 (s, 3H), 1.30-1.10 (s, 18H). ³¹P-NMR (162 MHz, DMSO-d₆) δ 18.14.

[0549] Preparation of Example 22 monomer: To a solution of 6 (2.1 g, 4.5 mmol) in DCM (21 mL) were added DCI (452.5 mg, 3.8 mmol) and CEP[N(iPr)₂]₂ (1.8 g, 5.9 mmol) at r.t. The reaction mixture was stirred at r.t. for 15 hrs under N₂ atmosphere. LCMS showed 6 was consumed. The mixture was diluted with water. The product was extracted with DCM (30 mL). The organic layer was washed with brine and dried over Na₂SO₄ and concentrated to give the crude. The crude was purified by Flash-Prep-HPLC with the following conditions (IntelFlash-1): Column, C18 silica gel; mobile phase, CH₃CN/H₂O (0.5% NH₄HCO₃)=1/1 increasing to CH₃CN/H₂O (0.5% NH₄HCO₃)=1/0 within 28 min, the eluted product was collected at CH₃CN/H₂O (0.5% NH₄HCO₃)=80/20 Detector, UV 254 nm. This resulted in to give

[0550] Example 22 monomer (2.8 g, 4.3 mmol, 95.2% yield) as an oil. ESI-LCMS: m/z 653.2 [M+H]⁺; ¹H-NMR (400 MHz, DMSO-d₆) δ 6.89-6.77 (m, 1H), 6.11-5.96 (m, 1H), 5.65-5.50 (m, 4H), 4.39-4.34 (d, J=20 Hz, 1H), 4.18-3.95 (m, 2H), 3.94-3.48 (s, 6H), 3.40-3.28 (m, 4H), 2.84-2.75 (m, 2H), 1.26-1.98 (s, 30H). ³¹P-NMR (162 MHz, DMSO-d₆) δ 149.018, 148.736, 17.775, 17.508.

### Example 23. Synthesis of 5′ End Cap Monomer

[chemical structure]

[0551] Preparation of (2): To a solution of 1 (ref for 1 Tetrahedron, 2013, 69, 600-606) (10.60 g, 47.32 mmol) in DMF (106 mL), imidazole (11.26 g, 165.59 mmol) and TBSCl (19.88 g, 132.53 mmol) were added. The mixture was stirred at r.t. for 3.5 hrs, LCMS showed 1 was consumed completely. Water was added and extracted with EA, dried over by Na₂SO₄. The filtrate was evaporated under reduced pressure to give 2 (20.80 g, 45.94 mmol, 97.19% yield) for the next step.

[0552] Preparation of (3): To a solution of 2 (20.80 g, 45.94 mmol) in THF (248 mL), was added TFA (124 mL) and H₂O (124 mL) at 0° C., reaction mixture was stirred for 30 min. LCMS showed 2 was consumed completely. Then was extracted with EA, washed with sat. NaCl (aq.), dried over by Na₂SO₄. The filtrate was evaporated under reduced pressure to give the crude product which was purified by Flash-Prep-HPLC with the following conditions (IntelFlash-1): Column, C18 silica gel; mobile phase, CH₃CN/H₂O (0.5% NH₄HCO₃)=1/1 increasing to CH₃CN/H₂O (0.5% NH₄HCO₃)=1/0 within 20 min, the eluted product was collected at CH₃CN/H₂O (0.5% NH₄HCO₃)=1/0; Detector, UV 254 nm. This resulted in to give 3 (10.00 g, 29.59 mmol, 64.31% yield). ¹H-NMR (400 MHz, DMSO-d₆): δ 7.33-7.18 (m, 5H), 4.83-4.80 (m, 1H), 4.61-4.59 (m, 1H), 4.21-4.19 (m, 1H), 3.75-3.74 (m, 1H), 3.23 (m, 3H), 3.13 (m, 3H), 2.41-2.40 (m, 1H), 0.81 (m, 9H), 0.00 (m, 6H).

[0553] Preparation of (4): To a solution of 3 (3.70 g, 10.95 mmol) in DMSO (37 mL) was added EDCI (6.30 g, 32.84 mmol). Then pyridine (0.95 g, 12.05 mmol) and TFA (0.69 g, 6.02 mmol) was added in N₂ atmosphere. The mixture was stirred for 3 hrs at r.t. LCMS showed 3 was consumed completely. Water was poured into and extracted with EA, washed with sat. NaCl (aq.), dried over by Na₂SO₄. The filtrate was evaporated under reduced pressure to give the crude product which was directly used for next step.

[0554] Preparation of (5): To a solution of 4 in toluene (100.00 mL), was added 4a (6.93 g, 10.97 mmol) and KOH (1.11 g, 19.78 mmol). It was stirred for 3.5 hrs at 40° C. in N₂ atmosphere. TLC and LCMS showed 4 was consumed completely. Then was extracted with EA, washed with water and sat. NaCl (aq.), dried over by Na₂SO₄. The filtrate was evaporated under reduced pressure to give the crude product which was purified by Flash-Prep-HPLC with the following conditions (IntelFlash-1): Column, C18 silica gel; mobile phase, CH₃CN/H₂O (0.5% NH₄HCO₃)=1/1 increasing to CH₃CN/H₂O (0.5% NH₄HCO₃)=1/0 within 20 min, the eluted product was collected at CH₃CN/H₂O (0.5% NH₄HCO₃)=1/0; Detector, UV 254 nm. This resulted in to give 5 (4.30 g, 6.70 mmol, 61.17% yield). ¹H-NMR (400 MHz, CDCl₃): δ 7.27-7.26 (m, 4H), 7.17 (m, 1H), 6.94-6.82 (m, 1H), 6.13-6.02 (m, 1H), 5.63-5.56 (m, 4H), 4.90-4.89 (m, 1H), 4.45-4.41 (m, 1H), 3.98-3.95 (m, 1H), 3.39-3.29 (m, 4H), 1.90 (m, 1H), 1.12-0.83 (m, 29H), 0.00 (m, 7H); ³¹P-NMR (162 MHz, CDCl₃): δ 18.021, 14.472.

[0555] Preparation of (6): To a solution of 5 (4.30 g, 6.70 mmol) in THF (43.00 mL) was added HCOOH (100 mL) and H₂O (100 mL). It was stirred overnight at r.t. LCMS showed 5 was consumed completely. NH₄OH was poured into it and was extracted with EA, washed with sat. NaCl (aq.), dried over by Na₂SO₄. The filtrate was evaporated under reduced pressure to give the crude product which was purified by Flash-Prep-HPLC with the following conditions (IntelFlash-1): Column, C18 silica gel; mobile phase, CH₃CN/H₂O (0.5% NH₄HCO₃)=1/1 increasing to CH₃CN/H₂O (0.5% NH₄HCO₃)=1/0 within 20 min, the eluted product was collected at CH₃CN/H₂O (0.5% NH₄HCO₃)=1/0; Detector, UV 254 nm. This resulted in to give 6 (2.10 g, 3.98 mmol, 59.32% yield). ¹H-NMR (400 MHz, CDCl₃): δ 7.40-7.28 (m, 5H), 7.11-7.00 (m, 1H), 6.19-6.14 (m, 1H), 5.71-5.68 (m, 4H), 4.95-4.94 (m, 1H), 4.48-4.47 (m, 1H), 4.05-4.03 (m, 1H), 3.62-3.61 (m, 1H), 3.46 (m, 3H), 3.00-2.99 (m, 1H), 1.22 (m, 18H); ³¹P-NMR (162 MHz, CDCl₃): δ 18.134.

[0556] Preparation of Example 23 monomer: To a solution of 6 (2.10 g, 3.98 mmol) in DCM (21 mL) was added DCI (410 mg, 3.47 mmol). CEP (1.40 g, 4.65 mmol) was added in a N₂ atmosphere. LCMS showed 6 was consumed completely. DCM and H₂O was poured, the organic phase was washed with water and sat. NaCl (aq.), dried over by Na₂SO₄. The filtrate was evaporated under reduced pressure at 40° C. to give the crude product which was purified by Flash-Prep-HPLC with the following conditions (IntelFlash-1): Column, C18 silica gel; mobile phase, CH₃CN/H₂O (0.5% NH₄HCO₃)=1/1 increasing to CH₃CN/H₂O (0.5% NH₄HCO₃)=1/0 within 20 min, the eluted product was collected at CH₃CN/H₂O (0.5% NH₄HCO₃)=1/0; Detector, UV 254 nm. This resulted in to give Example 23 monomer (2.10 g, 2.88 mmol). 1H-NMR (400 MHz, DMSO-d₆): δ 7.39-7.32 (m, 6H), 6.21-6.11 (m, 1H), 5.64-5.61 (m, 4H), 4.91-4.85 (m, 1H), 4.59 (m, 1H), 4.28-4.25 (m, 1H), 3.84-3.60 (m, 5H), 3.36-3.36 (m, 2H), 2.83-2.79 (m, 2H), 1.18-1.14 (m, 29H); ³¹P-NMR (162 MHz, DMSO-d₆): δ 149.588, 148.920, 17.355, 17.010.

### Example 24. Synthesis of 5′ End Cap Monomer

[chemical structure]

[0557] Preparation of (2): To a solution of 1 (5.90 g, 21.50 mmol) in DMF (60.00 mL), imidazole (4.39 g, 64.51 mmol) and TBSCl (7.63 g, 49.56 mmol) were added. The mixture was stirred at r.t. for 3.5 hrs, LCMS showed 1 was consumed completely. Water was added and extracted with EA, dried over by Na₂SO₄. The filtrate was evaporated under reduced pressure to give 2 (11.00 g, 21.91 mmol, 98.19% yield) for the next step. ESI-LCMS: m/z 225.1 [M+H]⁺.

[0558] Preparation of (3): To a solution of 2 (11.00 g, 21.91 mmol) in THF (55.00 mL) was added TFA (110.00 mL) and H₂O (55.00 mL) at 0° C., reaction mixture was stirred for 30 min. LCMS showed 2 was consumed completely. Then was extracted with EA, washed with sat. NaCl (aq.), dried over by Na₂SO₄. The filtrate was evaporated under reduced pressure to give the crude product which was purified by Flash-Prep-HPLC with the following conditions (IntelFlash-1): Column, C18 silica gel; mobile phase, CH₃CN/H₂O (0.5% NH₄HCO₃)=1/1 increasing to CH₃CN/H₂O (0.5% NH₄HCO₃)=1/0 within 20 min, the eluted product was collected at CH₃CN/H₂O (0.5% NH₄HCO₃)=1/0; Detector, UV 254 nm. This resulted in to give 3 (6.20 g, 16.32 mmol, 72.94% yield). ESI-LCMS: m/z 411.2 [M+H]⁺.

[0559] Preparation of (4): To a solution of 3 (3.50 g, 9.02 mmol) in DMSO (35.00 mL) was added EDCI (5.19 g, 27.06 mmol). Then pyridine (0.78 g, 9.92 mmol) and TFA (0.57 g, 4.96 mmol) was added in N₂ atmosphere. The mixture was stirred for 3 h at r.t. Water was poured into it and was extracted with EA, washed with sat. NaCl (aq.), dried over by Na₂SO₄. The filtrate was evaporated under reduced pressure to give the crude product which was directly used for next step. ESI-LCMS: m/z 406.2 [M+H]⁺.

[0560] Preparation of (5): To a solution of 4 in toluene (100.00 mL) was added 4a (5.73 g, 9.07 mmol) and KOH (916.3 g, 16.33 mmol). It was stirred for 3.5 h at 40° C. in N₂ atmosphere. Then was extracted with EA, washed with water and sat. NaCl (aq.), dried over by Na₂SO₄. The filtrate was evaporated under reduced pressure to give the crude product which was purified by Flash-Prep-HPLC with the following conditions (IntelFlash-1): Column, C18 silica gel; mobile phase, CH₃CN/H₂O (0.5% NH₄HCO₃)=1/1 increasing to CH₃CN/H₂O (0.5% NH₄HCO₃)=1/0 within 20 min, the eluted product was collected at CH₃CN/H₂O (0.5% NH₄HCO₃)=1/0; Detector, UV 254 nm. This resulted in to give 5 (5.02 g, 7.25 mmol, 80.44% yield). ESI-LCMS: m/z 693.2 [M+H]⁺; ³¹P-NMR (162 MHz, DMSO-d₆): δ 17.811

[0561] Preparation of (6): To a solution of 5 (4.59 g, 6.63 mmol) in THF (46.00 mL) was added HCOOH (92.00 mL) and H₂O (92.00 mL). It was stirred overnight at r.t. NH₄OH was poured into it and extracted with EA, washed with sat. NaCl (aq.), dried over by Na₂SO₄. The filtrate was evaporated under reduced pressure to give the crude product which was purified by Flash-Prep-HPLC with the following conditions (IntelFlash-1): Column, C18 silica gel; mobile phase, CH₃CN/H₂O (0.5% NH₄HCO₃)=1/1 increasing to CH₃CN/H₂O (0.5% NH₄HCO₃)=1/0 within 20 min, the eluted product was collected at CH₃CN/H₂O (0.5% NH₄HCO₃)=1/0; Detector, UV 254 nm. This resulted in to give 6 (2.52 g, 4.36 mmol, 65.80% yield).

[0562] Preparation of Example 24 monomer: To a solution of 6 (2.00 g, 3.46 mmol) in DCM (21.00 mL) was added DCI (370.00 mg, 3.11 mmol) and CEP (1.12 g, 4.15 mmol) was added in N₂ atmosphere. DCM and H₂O was poured, the organic phase was washed with water and sat. NaCl (aq.), dried over by Na₂SO₄. The filtrate was evaporated under reduced pressure at 38° C. to give the crude product which was purified by Flash-Prep-HPLC with the following conditions (IntelFlash-1): Column, C18 silica gel; mobile phase, CH₃CN/H₂O (0.5% NH₄HCO₃)=1/1 increasing to CH₃CN/H₂O (0.5% NH₄HCO₃)=1/0 within 20 min, the eluted product was collected at CH₃CN/H₂O (0.5% NH₄HCO₃)=1/0; Detector, UV 254 nm. This resulted in to give Example 24 monomer (2.10 g, 2.70 mmol, 78.07% yield). ¹H-NMR (400 MHz, DMSO-d₆): δ 7.39-7.32 (m, 6H), 6.21-6.11 (m, 1H), 5.64-5.61 (m, 4H), 4.91-4.85 (m, 1H), 4.59 (m, 1H), 4.28-4.25 (m, 1H), 3.84-3.60 (m, 5H), 3.36-3.36 (m, 2H), 2.83-2.79 (m, 2H), 1.18-1.14 (m, 29H). ³¹P-NMR (162 MHz, DMSO-d₆): δ 149.588, 148.920, 17.355, 17.010.

### Example 25. Synthesis of Monomer

[chemical structure]

[chemical structure]

[0563] Preparation of (2): To a solution of 1 (35.0 g, 53.2 mmol) in DMF (350 mL) was added imidazole (9.0 g, 133.0 mmol) then added TBSCl (12.0 g, 79.8 mmol) at 0° C. The mixture was stirred at r.t. for 14 hrs. TLC showed 1 was consumed completely. Water was added to the reaction. The product was extracted with EA, The organic layer was washed with NaHCO₃ and brine. Then the solution was concentrated under reduced pressure the crude 2 (41.6 g) as a white solid which was used directly for next step. ESI-LCMS: m/z 772 [M+H]⁺.

[0564] Preparation of (3): To a solution of 2 (41.0 g, 53.1 mmol) in 3% DCA (53.1 mmol, 350 mL) and Et₃SiH (53.1 mmol, 100 mL) at 0° C. The mixture was stirred at 0° C. for 0.5 h. TLC showed 2 was consumed completely. NaHCO₃ was added to the reaction. The product was extracted with EA, The organic layer was washed with NaHCO₃ and brine. Then the solution was concentrated under reduced pressure. The residue silica gel column chromatography (eluent, DCM/MeOH=100:1˜20:1). This resulted in to give 3 (20.0 g, 41.7 mmol, 78.6% over two step) as a white solid. ESI-LCMS: m/z 470 [M+H]⁺; ¹H-NMR (400 MHz, DMSO-d₆): δ 12.12 (s, 1H), 11.67 (s, 1H), 8.28 (s, 1H), 6.12-6.07 (dd, J=15 Hz, 1H), 5.75 (d, J=5 Hz, 1H), 5.48-5.24 (m, 2H), 4.55-4.49 (m, 1H), 3.97 (s, 1H), 3.75-3.55 (m, 2H), 2.79-2.76 (m, 1H), 1.12 (d, J=6 Hz, 6H), 0.88 (s, 9H), 0.11 (d, J=6 Hz, 6H).

[0565] Preparation of (4): To the solution of 3 (20 g, 42.6 mmol) in dry DCM (100 mL) and DMF (60 mL) was added PDC (20. g, 85.1 mmol), tert-butyl alcohol (63.1 g, 851.8 mmol) and Ac₂O (43.4 g, 425.9 mmol) at r.t. under N₂ atmosphere. And the reaction mixture was stirred at r.t. for 2 h. The solvent was removed to give a residue which was purified by silica gel column chromatography (eluent, PE:EA=4:1˜2:1) to give a residue which was purified by Flash-Prep-HPLC with the following conditions (IntelFlash-1): Column, C18 silica gel; mobile phase, CH₃CN/H₂O (0.5% NH₄HCO₃)=1/1 increasing to CH₃CN/H₂O (0.5% NH₄HCO₃)=1/0 within 20 min, the eluted product was collected at CH₃CN/H₂O (0.5% NH₄HCO₃)=1/0; Detector, UV 254 nm. This resulted in to give 4 (16.0 g, 29.0 mmol, 68.2% yield) as a white solid. ESI-LCMS: m/z 540 [M+H]⁺; ¹H-NMR (400 MHz, DMSO-d₆): δ 12.12 (s, 1H), 11.69 (s, 1H), 8.28 (s, 1H), 6.21-6.17 (dd, J=15 Hz, 1H), 5.63-5.55 (m, 1H), 4.75-4.72 (m, 1H), 4.41 (d, J=5 Hz, 1H), 2.79-2.76 (m, 1H), 1.46 (s, 9H), 1.13-1.11 (m, 6H), 0.90 (s, 9H), 0.14 (d, J=2 Hz, 6H).

[0566] Preparation of (5): To the solution of 4 (16.0 g, 29.6 mmol) in dry THF/MeOD/D₂O=10/2/1 (195 mL) was added NaBD₄ (3.4 g, 88.9 mmol) at r.t. and the reaction mixture was stirred at 50° C. for 2 h. After completion of reaction, adjusted pH value to 7 with CH₃COOD, after addition of water, the resulting mixture was extracted with EA (300 mL). The combined organic layer was washed with water and brine, dried over Na₂SO₄, Then the solution was concentrated under reduced pressure the crude 5 (11.8 g) as a white solid which was used directly for next step. ESI-LCMS: m/z 402 [M+H]⁺.

[0567] Preparation of (6): To a solution of 5 (5.0 g, 12.4 mmol) in pyridine (50 mL) was added iBuCl (2.6 g, 24.9 mmol) at 0° C. under N₂ atmosphere. The mixture was stirred at r.t. for 14 h. TLC showed 5 was consumed completely. Then the solution diluted with EA. The organic layer was washed with NaHCO₃ and brine. Then the solution was concentrated under reduced pressure to give the crude. To a solution of the crude in pyridine (50 mL) was added 2N NaOH (MeOH/H₂O=4:1, 15 mL) at 0° C. The mixture was stirred at 0° C. for 10 min. Then the solution diluted with EA The organic layer was washed with NH₄Cl and brine. Then the solution was concentrated under reduced pressure the residue was purified by Flash-Prep-HPLC with the following conditions (IntelFlash-1): Column, C18 silica gel; mobile phase, CH₃CN/H₂O (0.5% NH₄HCO₃)=1/3 increasing to CH₃CN/H₂O (0.5% NH₄HCO₃)=4/1 within 25 min, the eluted product was collected at CH₃CN/H₂O (0.5% NH₄HCO₃)=3/2; Detector, UV 254 nm. This resulted in to give 6 (6 g, 10.86 mmol, 87.17% yield) as a white solid. ESI-LCMS: m/z 472.2 [M+H]⁺; ¹H-NMR (400 MHz, DMSO-d₆): δ 12.12 (s, 1H), 11.67 (s, 1H), 8.28 (s, 1H), 6.12-6.07 (dd, J=15 Hz, 1H), 5.48-5.24 (m, 2H), 5.22 (s, 1H), 4.55-4.49 (m, 1H), 3.97 (d, J=5 Hz, 1H), 2.79-2.76 (m, 1H), 1.12 (d, J=6 Hz, 6H), 0.88 (s, 9H), 0.11 (d, J=6 Hz, 6H).

[0568] Preparation of (7): To a solution of 6 (3.8 g, 8.1 mmol) in pyridine (40 mL) was added DMTrCl (4.1 g, 12.1 mmol) at 20° C. The mixture was stirred at 20° C. for 1 h. TLC showed 7 was consumed completely. Water was added to the reaction. The product was extracted with EA, The organic layer was washed with NaHCO₃ and brine. Then the solution was concentrated under reduced pressure to give the crude product of 7 (6 g, 7.6 mmol, 94.3% yield) as a yellow solid. ESI-LCMS: m/z 775 [M+H]⁺.

[0569] Preparation of (8): To a solution of 7 (6.0 g, 7.75 mmol) in THF (60 mL) was added TBAF (2.4 g, 9.3 mmol). The mixture was stirred at r.t. for 1 h. TLC showed 7 was consumed completely. Water was added to the reaction. The product was extracted with EA, The organic layer was washed with NaHCO₃ and brine. Then the solution was concentrated under reduced pressure, the residue was purified by Flash-Prep-HPLC with the following conditions (IntelFlash-1): Column, C18 silica gel; mobile phase, CH₃CN/H₂O (0.5% NH₄HCO₃)=1/1 increasing to CH₃CN/H₂O (0.5% NH₄HCO₃)=1/0 within 25 min, the eluted product was collected at CH₃CN/H₂O (0.5% NH₄HCO₃)=4/1; Detector, UV 254 nm. This resulted in to give 8 (4.0 g, 5.9 mmol, 76.6% yield) as a white solid. ESI-LCMS: m/z 660 [M+H]⁺; ¹H-NMR (400 MHz, DMSO-d₆): δ 12.12 (s, 1H), 11.67 (s, 1H), 8.12 (s, 1H), 7.34-7.17 (m, 9H), 6.83-6.78 (m, 4H), 6.23-6.18 (m, 1H), 5.66 (d, J=7 Hz, 1H), 5.48-5.35 (m, 1H), 4.65-4.54 (m, 1H), 3.72 (d, J=2 Hz, 6H), 2.79-2.73 (m, 1H), 1.19-1.06 (m, 6H).

[0570] Preparation of Example 25 monomer: To a solution of 9 (4.0 g, 6.1 mmol) in DCM (40 mL) was added DCI (608 mg, 5.1 mmol) and CEP (2.2 g, 7.3 mmol) under N₂ pro. The mixture was stirred at 20° C. for 0.5 h. TLC showed 9 was consumed completely. The product was extracted with DCM, The organic layer was washed with H₂O and brine. Then the solution was concentrated under reduced pressure and the residue was purified by Flash-Prep-HPLC with the following conditions (IntelFlash-1): Column, C18 silica gel; mobile phase, CH₃CN/H₂O (0.5% NH₄HCO₃)=1/1 increasing to CH₃CN/H₂O (0.5% NH₄HCO₃)=1/0 within 25 min, the eluted product was collected at CH₃CN/H₂O (0.5% NH₄HCO₃)=1/0; Detector, UV 254 nm. This resulted in to give Example 25 monomer (5.1 g, 5.81 mmol, 95.8% yield) as a white solid. ESI-LCMS: m/z 860 [M+H]⁺; ¹H-NMR (400 MHz, DMSO-d₆): δ 12.12 (s, 1H), 11.67 (s, 1H), 8.12 (s, 1H), 7.34-7.17 (m, 9H), 6.83-6.78 (m, 4H), 6.23-6.18 (m, 1H), 5.67-5.54 (m, 1H), 4.70-4.67 (m, 1H), 4.23-4.20 (m, 1H), 3.72 (m, 6H), 3.60-3.48 (m, 3H), 2.79-2.58 (m, 3H), 1.13-0.94 (m, 18H); ³¹P-NMR (162 MHz, DMSO-d₆): δ 150.31, 150.26, 140.62, 149.57.

### Example 26: Synthesis of Monomer

[chemical structure]

[chemical structure]

[0571] Preparation of (2): To a solution of 1 (35 g, 130.2 mmol) in DMF (350 mL) was added imidazole (26.5 g, 390.0 mmol) then added TBSCl (48.7 g, 325.8 mmol) at 0° C. The mixture was stirred at r.t. for 14 h. TLC showed 1 was consumed completely. Water was added to the reaction. The product was extracted with EA, The organic layer was washed with NaHCO₃ and brine. Then the solution was concentrated under reduced pressure the crude 2 (64.6 g) as a white solid which was used directly for next step. ESI-LCMS: m/z 498 [M+H]⁺.

[0572] Preparation of (3): To a solution of 2 (64.6 g, 130.2 mmol) in THF (300 mL) and added TFA/H₂O (1:1, 300 mL) at 0° C. The mixture was stirred at 0° C. for 2 h. TLC showed 2 was consumed completely. NaHCO₃ was added to the reaction. The product was extracted with EA, The organic layer was washed with NaHCO₃ and brine. Then the solution was concentrated under reduced pressure. The residue was purified by silica gel column chromatography (eluent, DCM:MEOH=100:1˜20:1). This resulted in to give 3 (31.3 g, 81.7 mmol, 62.6% over two step) as a white solid. ESI-LCMS: m/z 384 [M+H]⁺.

[0573] Preparation of (4): To a solution of 3 (31.3 g, 81.7 mmol) in ACN/H₂O (1:1, 350 mL) was added DAIB (78.0 g, 244.0 mmol) and Tempo (3.8 g, 24.4 mmol). The mixture was stirred at 40° C. for 2 h. TLC showed 3 was consumed completely. Then filtered to give 4 (22.5 g, 55.5 mmol, 70.9%) as a white solid. ESI-LCMS: m/z 398 [M+H]⁺.

[0574] Preparation of (5): To a solution of 4 (22.5 g, 55.5 mmol) in MeOH (225 mL) held at −15° C. with an ice/MeOH bath was added SOCl₂ (7.6 mL, 94.5 mmol), dropwise at such a rate that the reaction temp did not exceed 7° C. After the addition was complete, cooling was removed, the reaction was allowed to stir at room temp. The mixture was stirred at r.t. for 14 h. TLC showed 4 was consumed completely. Then the solution was concentrated under reduced pressure to get crude 5 (23.0 g) as a white solid which was used directly for next step. ESI-LCMS: m/z 298 [M+H]⁺.

[0575] Preparation of (6): To a solution of 5 (23 g, 55.5 mmol) in DMF (220 mL) was added imidazole (11.6 g, 165.0 mmol) then added TBSCl (12.3 g, 82.3 mmol) at 0° C. The mixture was stirred at 20° C. for 14 h. TLC showed 1 was consumed completely. Water was added to the reaction. The product was extracted with EA, The organic layer was washed with NaHCO₃ and brine. Then the solution was concentrated under reduced pressure. The residue was purified by silica gel column chromatography (eluent, DCM:MEOH=100:1˜20:1). This resulted in to give 6 (21.3 g, 51.1 mmol, 90% over two step) as a white solid. ESI-LCMS: m/z 412 [M+H]⁺.

[0576] Preparation of (7): To the solution of 6 (21.0 g, 51.0 mmol) in dry THF/MeOD/D₂O=10/2/1 (260.5 mL) was added NaBD₄ (6.4 g, 153.1 mmol) at r.t. and the reaction mixture was stirred at 50° C. for 2 h. After completion of reaction, the resulting mixture was added CH₃COOD to pH=7, after addition of water, the resulting mixture was extracted with EA (300 mL). The combined organic layer was washed with water and brine, dried over Na₂SO₄. Then the solution was concentrated under reduced pressure and the residue was used for next step without further purification. ESI-LCMS: m/z 386 [M+H]⁺.

[0577] Preparation of (8): To a stirred solution of 7 (14.0 g, 35 mmol) in pyridine (50 mL) were added BzCl (17.2 g, 122.5 mmol) at 0° C. under N₂ atmosphere. The mixture was stirred at r.t. for 14 h. TLC showed 7 was consumed completely. Then the solution diluted with EA. The organic layer was washed with NaHCO₃ and brine. Then the solution was concentrated under reduced pressure and the residue was used for next step without further purification. To a solution of the crude in pyridine (300 mL) then added 2M NaOH (MeOH: H₂O=4:1, 60 mL) at 0° C. The mixture was stirred at 0° C. for 10 min. Then the solution diluted with EA. The organic layer was washed with NH₄Cl and brine. Then the solution was concentrated under reduced pressure and the residue was purified by Flash-Prep-HPLC with the following conditions (IntelFlash-1): Column, C18 silica gel; mobile phase, CH₃CN/H₂O (0.5% NH₄HCO₃)=1/3 increasing to CH₃CN/H₂O (0.5% NH₄HCO₃)=4/1 within 25 min, the eluted product was collected at CH₃CN/H₂O (0.5% NH₄HCO₃)=3/2; Detector, UV 254 nm. This resulted in to give 8 (14 g, 28.02 mmol, 69.21% yield) as a white solid. ESI-LCMS: m/z 490 [M+H]⁺; ¹H-NMR (400 MHz, DMSO-d₆): δ 11.24 (s, 1H), 8.76 (s, 1H), 8.71 (m, 1H), 8.04 (d, J=7 Hz, 2H), 7.66-7.10 (m, 5H), 6.40-6.35 (dd, 1H), 5.71-5.56 (m, 1H), 5.16 (s, 1H), 4.79-4.72 (m, 1H), 4.01 (m, 1H), 0.91 (s, 9H), 0.14 (m, 6H).

[0578] Preparation of (9): To a solution of 8 (5.1 g, 10.4 mmol) in pyridine (50 mL) was added DMTrCl (5.3 g, 15.6 mmol). The mixture was stirred at r.t. for 1 h. TLC showed 8 was consumed completely. Water was added to the reaction. The product was extracted with EA, The organic layer was washed with NaHCO₃ and brine. Then the solution was concentrated under reduced pressure and the residue was used for next step without further purification. ESI-LCMS: m/z 792 [M+H]⁺.

[0579] Preparation of (10): To a solution of 9 (7.9 g, 10.0 mmol) in THF (80 mL) was added 1M TBAF in THF (12 mL). The mixture was stirred at r.t. for 1 h. TLC showed 9 was consumed completely. Water was added to the reaction. The product was extracted with EA, The organic layer was washed with NaHCO₃ and brine. Then the solution was concentrated under reduced pressure the residue was purified by Flash-Prep-HPLC with the following conditions (IntelFlash-1): Column, C18 silica gel; mobile phase, CH₃CN/H₂O (0.5% NH₄HCO₃)=1/1 increasing to CH₃CN/H₂O (0.5% NH₄HCO₃)=1/0 within 25 min, the eluted product was collected at CH₃CN/H₂O (0.5% NH₄HCO₃)=4/1; Detector, UV 254 nm. This resulted in to give 10 as a white solid. ESI-LCMS: m/z 678 [M+H]⁺; ¹H-NMR (400 MHz, DMSO-d₆): δ 11.25 (s, 1H), 8.74 (s, 1H), 8.62 (s, 1H), 8.04 (d, J=7 Hz, 2H), 7.66-7.53 (m, 3H), 7.33-7.15 (m, 9H), 6.82-6.78 (m, 4H), 6.43 (d, J=20 Hz, 1H), 5.76-5.60 (m, 1H), 4.88-4.80 (m, 1H), 4.13 (d, J=8 Hz, 1H), 3.71 (m, 6H).

[0580] Preparation of Example 26 monomer: To a solution of 10 (6.2 g, 9.1 mmol) in DCM (60 mL) was added DCI (1.1 g, 9.4 mmol) and CEP (3.3 g, 10.9 mmol) under N₂ pro. The mixture was stirred at 20° C. for 0.5 h. TLC showed 10 was consumed completely. The product was extracted with DCM, The organic layer was washed with H₂O and brine. Then the solution was concentrated under reduced pressure and the residue was purified by Flash-Prep-HPLC with the following conditions (IntelFlash-1): Column, C18 silica gel; mobile phase, CH₃CN/H₂O (0.5% NH₄HCO₃)=1/1 increasing to CH₃CN/H₂O (0.5% NH₄HCO₃)=1/0 within 20 min, the eluted product was collected at CH₃CN/H₂O (0.5% NH₄HCO₃)=1/0; Detector, UV 254 nm. This resulted in to give Example 26 monomer (7.5 g, 8.3 mmol, 90.7%) as a white solid. ESI-LCMS: m/z 878 [M+H]⁺; ¹H-NMR (400 MHz, DMSO-d₆): δ 11.25 (s, 1H), 8.68-8.65 (dd, 2H), 8.04 (m, 2H), 7.66-7.53 (m, 3H), 7.33-7.15 (m, 9H), 6.82-6.78 (m, 4H), 6.53-6.43 (m, 1H), 5.96-5.81 (m, 1H), 5.36-5.15 (m, 1H), 4.21 (m, 1H), 3.86-3.52 (m, 10H), 2.79-2.61 (m, 2H), 1.21-0.99 (m, 12H); ³¹P-NMR (162 MHz, DMSO-d₆): δ 149.60, 149.56, 149.48.

### Example 27. Synthesis of End Cap Monomer

[chemical structure]

[chemical structure]

[chemical structure]

[0581] Preparation of (2): To a solution of 1 (20.0 g, 71.2 mmol) in dry pyridine (200.0 mL) was added TBSCl (26.8 g, 177.9 mmol) and imidazole (15.6 g, 227.8 mmol). The mixture was stirred at r.t. for 15 h. TLC showed 1 was consumed completely. The reaction mixture was concentrated to give residue. The residue was quenched with DCM (300.0 mL). The DCM layer was washed with H₂O (100.0 mL*2) and brine. The DCM layer concentrated to give crude 2 (45.8 g) as a yellow oil. The crude used to next step directly. ESI-LCMS m/z 510.5 [M+H]⁺.

[0582] Preparation of (3): To a mixture solution of 2 (45.8 g) in THF (300.0 mL) was added mixture of H₂O (100.0 mL) and TFA (100.0 mL) at 0° C. over 30 min. Then the reaction mixture was stirred at 0° C. for 4 h. TLC showed the 2 was consumed completely. The reaction mixture pH was adjusted to 7-8 with NH₃·H₂O (100 mL). Then the mixture was extracted with EA (500.0 mL*2). The combined EA layer was washed with brine and concentrated to give crude which was purified by c.c. (PE:EA=5:1 ˜1:0) to give compound 3 (21.0 g, 53.2 mmol, 74.7% yield over 2 steps) as a white solid. ESI-LCMS m/z 396.2 [M+H]⁺.

[0583] Preparation of (4): To a solution of 3 (21.0 g, 53.2 mmol) in ACN (100.0 mL) and water (100.0 mL) were added (diacetoxyiodo)benzene (51.0 g, 159.5 mmol) and TEMPO (2.5 g, 15.9 mmol), The reaction mixture was stirred at 40° C. for 1 h. TLC showed the 3 was consumed completely. The reaction mixture was cooled down to r.t. and filtered, the filtrate was concentrated to give crude which was purified by crystallization (ACN) to give 4 (14.5 g, 35.4 mmol, 66.2% yield). ESI-LCMS m/z 410.1 [M+H]⁺.

[0584] Preparation of (5): To a solution of 4 (14.5 g, 35.4 mmol) in toluene (90.0 mL) and MeOH (60.0 mL) was added trimethylsilyldiazomethane (62.5 mL, 2.0 M, 141.8 mmol) at 0° C., then stirred at r.t. for 2 h. TLC showed the 4 was consumed completely. The solvent was removed under reduce pressure, the residue was purified by crystallization (ACN) to give 5 (10.0 g, 23.6 mmol, 66.6% yield). ESI-LCMS m/z 424.2 [M+H]⁺

[0585] Preparation of (6): To the solution of 5 (10.0 g, 23.6 mmol) in dry THF/MeOD/D₂O=10/2/1 (100.0 mL) was added NaBD₄ (2.98 g, 70.9 mmol) three times during an hour at 40° C., the reaction mixture was stirred at r.t. for 2.0 h. The resulting mixture was added CH₃COOD change pH=7.5, after addition of water, the resulting mixture was extracted with EA (50.0 mL*3). The combined organic layer was washed with water and brine, dried over Na₂SO₄, concentrated to give a residue which was purified by c.c. (PE/EA=1:1 ˜1:0). This resulted in to give 6 (6.1 g, 15.4 mmol, 65.3% yield) as a white solid. ESI-LCMS m/z 398.1 [M+H]⁺; ¹H-NMR (400 MHz, DMSO-d₆) δ 8.28 (s, 1H), 8.02 (s, 1H), 7.23 (s, 2H), 5.86 (d, J=6.4 Hz, 1H), 5.26 (s, 1H), 4.42-4.41 (m, 1H), 4.35-4.32 (m, 1H), 3.82 (d, J=2.6 Hz, 1H), 3.14 (s, 3H), 0.78 (s, 9H), 0.00 (d, J=0.9 Hz, 6H).

[0586] Preparation of (7): To a solution of 6 (6.1 g, 15.4 mmol) in pyridine (60.0 mL) was added the benzoyl chloride (6.5 g, 46.2 mmol) drop wise at 5° C. The reaction mixture was stirred at r.t. for 2 h. TLC showed the 6 was consumed completely. The reaction mixture was cooled down to 10° C. and quenched with H₂O (20.0 mL), extracted with EA (200.0 mL*2), combined the EA layer. The organic phase was washed with brine and dried over Na₂SO₄, concentrated to give the crude (12.0 g) which was dissolved in pyridine (60.0 mL), cooled to 0° C., 20.0 mL NaOH (2 M in methanol: H₂O =4:1) was added and stirred for 10 min. The reaction was quenched by saturated solution of ammonium chloride, the aqueous layer was extracted with EA (200.0 mL*2), combined the EA layer, washed with brine and dried over Na₂SO₄, concentrated. The residue was purified by c.c. (PE/EA=10:1 ˜1:1) to give 7 (7.0 g, 13.9 mmol, 90.2% yield). ESI-LCMS m/z 502.2 [M+H]⁺; ¹H-NMR (400 MHz, DMSO-d₆) δ 11.24 (s, 1H, exchanged with D₂O) 8.77 (s, 2H), 8.04-8.06 (m, 2H), 7.64-7.66 (m, 2H), 7.54-7.58 (m, 2H), 6.14-6.16 (d, J=5.9 Hz, 1H), 5.20-5.23 (m, 1H), 4.58-4.60 (m, 1H), 4.52-4.55 (m, 1H), 3.99-4.01 (m, 1H), 3.34 (s, 4H), 0.93 (s, 9H), 0.14-0.15 (d, J=1.44 Hz, 6H).

[0587] Preparation of (8): To a stirred solution of 7 (5.5 g, 10.9 mmol) in DMSO (55.0 mL) was added EDCI (6.3 g, 32.9 mmol), pyridine (0.9 g, 10.9 mmol) and TFA (0.6 g, 5.5 mmol), the reaction mixture was stirred at r.t. for 15 h. The reaction was quenched with water and extracted with EA (100.0 mL). The organic phase was washed by brine, dried over Na₂SO₄, The organic phase was evaporated to dryness under reduced pressure to give a residue 8 (4.8 g) which was used directly to next step. ESI-LCMS: m/z 517.1 [M+H₂O]⁺.

[0588] Preparation of (9b): A solution of 9a (35.0 g, 150.8 mmol) and NaI (90.5 g, 603.4 mmol) in dry ACN (180.0 mL) was added chloromethyl pivalate (113.6 g, 754.3 mmol) at r.t., the reaction was stirred at 80° C. for 4 h. The reaction was cooled to r.t. and quenched by water, then the mixture was extracted with EA (500.0 mL*3), combined the organic layer was washed with saturated solution of ammonium chloride, followed by with brine and dried over Na₂SO₄. Then the organic layer was concentrated to give a residue which was purified by c.c., this resulted in to give 9b (38.0 g, 60.1 mmol, 39.8% yield) as a white solid. ESI-LCMS m/z 655.2 [M+Na]⁺; ¹H-NMR (400 MHz, CDCl₃): δ 5.74-5.67 (m, 8H), 2.67 (t, J=21.6 Hz, 2H), 1.23 (s, 36H).

[0589] Preparation of (9): 3.8 g 10% Pd/C was washed with dry THF (30.0 mL) three times. Then transferred into a round-bottom flask charged with 9b (38.0 g, 60.1 mmol) and solvent (dry THF: D₂O=5:1, 400.0 mL), the mixture was stirred at 80° C. under 1 L H₂ balloon for 15 h. The reaction was cooled to r.t. and extracted with EA (500.0 mL*3), combined the organic layer was washed with brine and dried over Na₂SO₄. The residue 9 (3.0 g, 3.7 mmol, 38.8% yield) as a white solid was used directly to next step without further purification. ESI-LCMS m/z 657.2 [M+Na]⁺; ¹H-NMR (400 MHz, CDCl₃): δ 5.74-5.67 (m, 8H), 1.23 (s, 36H).

[0590] Preparation of (10): A solution of 8 (4.8 g, 9.6 mmol), 9 (7.3 g, 11.5 mmol) and K₂CO₃ (4.0 g, 38.8 mmol) in dry THF (60.0 mL) and D₂O (20.0 mL) was stirred at r.t. 18 h. LC-MS showed 8 was consumed completely. The product was extracted with EA (300.0 mL) and the organic layer was washed with brine and dried over Na₂SO₄. Then the organic layer was concentrated to give a residue which was purified by c.c. (PE/EA=5:1 ˜1:1) and MPLC. This resulted in to give 10 (3.0 g, 3.7 mmol, 38.8% yield) as a white solid. ESI-LCMS m/z 806.4 [M+H]⁺; ¹H-NMR (400 MHz, DMSO-d₆): δ 11.25 (s, 1H, exchanged with D₂O) 8.75 (s, 2H), 8.07-8.05 (d, J=8.0 Hz, 2H), 7.67-7.54 (m, 3H), 6.05 (d, J=5.1 Hz, 1H), 5.65-5.58 (m, 4H), 4.80-4.70 (m, 2H), 4.59-4.57 (m, 1H), 3.36 (s, 3H), 1.11 (s, 9H), 1.10 (s, 9H), 0.94 (s, 9H), 0.17-0.16 (m, 6H); ³¹P NMR (162 MHz, DMSO-d₆) δ 17.02.

[0591] Preparation of (11): To a round-bottom flask was added 10 (3.0 g, 3.7 mmol) in a mixture of H₂O (30.0 mL), HCOOH (30.0 mL). The reaction mixture was stirred at 40° C. for 15 hrs. LC-MS showed the 10 was consumed completely. The reaction mixture was adjusted the pH=6-7 with con. NH₃·H₂O (100.0 mL). Then the mixture was extracted with DCM (100.0 mL*3). The combined DCM layer was dried over Na₂SO₄. Filtered and filtrate was concentrated to give crude which was purified by Flash-Prep-HPLC with the following conditions (IntelFlash-1): Column, C18 silica gel; mobile phase, CH₃CN/H₂O (0.5% NH₄HCO₃)=1/2 increasing to CH₃CN/H₂O (0.5% NH₄HCO₃)=1/0 within 20 min, the eluted product was collected at CH₃CN/H₂O (0.5% NH₄HCO₃)=3/2; Detector, UV 254 nm. To give product 11 (1.8 g, 2.6 mmol, 70.3% yield). ESI-LCMS m/z=692.2 [M+H]⁺; ¹H-NMR (400 MHz, DMSO-d₆): δ 11.11 (s, 1H, exchanged with D₂O) 8.71-8.75 (d, J=14.4, 2H), 8.04-8.06 (m, 2H), 7.64-7.65 (m, 1H), 7.54-7.58 (m, 2H), 6.20-6.22 (d, J=5.4, 2H), 5.74-5.75 (d, J=5.72, 2H), 5.56-5.64 (m, 4H), 4.64-4.67 (m, 1H), 4.58-4.59 (m, 1H), 4.49-4.52 (m, 1H), 3.37 (s, 3H), 1.09-1.10 (d, J=1.96, 18H); ³¹P NMR (162 MHz, DMSO-d₆) δ 17.46.

[0592] Preparation of Example 27 monomer: To a solution of 11 (1.8 g, 2.6 mmol) in DCM (18.0 mL) was added the DCI (276.0 mg, 2.3 mmol), then CEP[N(ipr)₂]₂ (939.5 mg, 3.1 mmol) was added. The mixture was stirred at r.t. for 1 h. TLC showed 11 consumed completely. The reaction mixture was washed with H₂O (50.0 mL*2) and brine (50.0 mL*2), dried over Na₂SO₄ and concentrated to give crude which was purified by Flash-Prep-HPLC with the following conditions (IntelFlash-1): Column, C18 silica gel; mobile phase, CH₃CN/H₂O (0.5% NH₄HCO₃)-1/1 increasing to CH₃CN/H₂O (0.5% NH₄HCO₃)=1/0 within 20 min, the eluted product was collected at CH₃CN/H₂O (0.5% NH₄HCO₃)=9/1; Detector, UV 254 nm. The product was concentrated to give Example 27 monomer (2.0 g, 2.2 mmol, 86.2% yield) as a white solid. ESI-LCMS m/z 892.3 [M+H]⁺; ¹H-NMR (400 MHz, DMSO-d₆): δ 11.27 (s, 1H, exchanged with D₂O) 8.72-8.75 (m, 2H), 8.04-8.06 (m, 2H), 7.54-7.68 (m, 3H), 6.20-6.26 (m, 1H), 5.57-5.64 (m, 4H), 4.70-4.87 (m, 3H), 3.66-3.88 (m, 4H), 3.37-3.41 (m, 3H), 2.82-2.86 (m, 2H), 1.20-1.21 (m, 12H), 1.08-1.09 (m, 18H); ³¹P-NMR (162 MHz, DMSO-d₆): δ 150.03, 149.19, 17.05, 16.81.

### Example 28. Synthesis of 5′ End Cap Monomer

[chemical structure]

[chemical structure]

[0593] Preparation of (6): To a stirred solution of 5 (8.0 g, 21.3 mmol, Scheme 3) in DMSO (80.0 mL) were added EDCI (12.2 g, 63.9 mmol), pyridine (1.7 g, 21.3 mmol), TFA (1.2 g, 10.6 mmol) at r.t. And the reaction mixture was stirred at r.t. for 1.5 h. The reaction was quenched with water and extracted with EA (200.0 mL). The organic phase was washed by brine, dried over Na₂SO₄, The organic phase was evaporated to dryness under reduced pressure to give a residue 6 which was used directly to next step. ESI-LCMS: m/z 372.3 [M+H]⁺.

[0594] Preparation of (8): To a solution of K₂CO₃ (5.5 g, 8.3 mmol) in dry THF (60.0 mL) and D₂O (20.0 mL) was added a solution of 6 (8.0 g, 21.5 mmol) in dry THF (10.0 mL). The reaction mixture was stirred at r.t. overnight. LC-MS showed 6 was consumed completely. The product was extracted with EA (300.0 mL) and the organic layer was washed with brine and dried over Na₂SO₄. Then the organic layer was concentrated to give a residue which was purified by Flash-Prep-HPLC with the following conditions (IntelFlash-1): Column, C18 silica gel; mobile phase, CH₃CN/H₂O (0.5% NH₄HCO₃)=2/3 increasing to CH₃CN/H₂O (0.5% NH₄HCO₃)=3/2 within 20 min, the eluted product was collected at CH₃CN/H₂O (0.5% NH₄HCO₃)=1/1; Detector, UV 254 nm. This resulted in to give 8 (5.0 g, 7.3 mmol, 40.0%) as a white solid. ESI-LCMS: m/z 679.3 [M+H]⁺; ¹H-NMR (400 MHz, Chloroform-d): δ 9.91 (s, 1H), 7.29 (d, J=8.1 Hz, 1H), 5.82 (d, J=2.7 Hz, 1H), 5.72 (d, J=8.1 Hz, 1H), 5.65-5.54 (m, 4H), 4.43 (dd, J=7.2, 3.2 Hz, 1H), 3.92 (dd, J=7.2, 5.0 Hz, 1H), 3.65 (dd, J=5.1, 2.7 Hz, 1H), 3.44 (s, 3H), 1.13 (s, 18H), 0.82 (s, 9H), 0.01 (d, J=4.8 Hz, 6H); ³¹P NMR (162 MHz, Chloroform-d): δ 16.40.

[0595] Preparation of (9): To a solution of HCOOH (50.0 mL) and H₂O (50.0 mL) was added 8 (5.0 g, 7.3 mmol). The reaction mixture was stirred at 40° C. overnight. LC-MS showed 8 was consumed completely. A solution of NaHCO₃ (500.0 mL) was added. The product was extracted with EA (300.0 mL) and the organic layer was washed with brine and dried over Na₂SO₄. Then the organic layer was concentrated to give a residue which was purified by Flash-Prep-HPLC with the following conditions (IntelFlash-1): Column, C18 silica gel; mobile phase, CH₃CN/H₂O (0.5% NH₄HCO₃)=2/3 increasing to CH₃CN/H₂O (0.5% NH₄HCO₃)=3/2 within 20 min, the eluted product was collected at CH₃CN/H₂O (0.5% NH₄HCO₃)=1/1; Detector, UV 254 nm. This resulted in to give 9 (3.0 g, 5.4 mmol, 73.2%) as a white solid. ESI-LCMS: m/z 565.2 [M+H]⁺; ¹H-NMR (400 MHz, DMSO-d₆): δ 11.43 (s, 1H), 7.64 (d, J=8.1 Hz, 1H), 5.83 (d, J=4.3 Hz, 1H), 5.69-5.56 (m, 5H), 5.54 (d, J=6.7 Hz, 1H), 4.37 (dd, J=6.1, 2.9 Hz, 1H), 4.12 (q, J=6.1 Hz, 1H), 3.96 (dd, J=5.4, 4.3 Hz, 1H), 3.39 (s, 3H), 1.16 (s, 18H); ³¹P NMR (162 MHz, DMSO-d₆): δ 17.16.

[0596] Preparation of Example 28 monomer: To a suspension of 9 (2.6 g, 4.6 mmol) in DCM (40.0 mL) was added DCI (0.5 g, 5.6 mmol) and CEP[N(iPr)₂]₂ (1.7 g, 5.6 mmol). The mixture was stirred at r.t. for 1.0 h. LC-MS showed 9 was consumed completely. The solution was washed with water twice and washed with brine and dried over Na₂SO₄. Then concentrated to give a residue which was purified by Flash-Prep-HPLC with the following conditions (IntelFlash-1): Column, C18 silica gel; mobile phase, CH₃CN/H₂O (0.5% NH₄HCO₃)=1/1 increasing to CH₃CN/H₂O (0.5% NH₄HCO₃)=1/0 within 20 min, the eluted product was collected at CH₃CN/H₂O (0.5% NH₄HCO₃)=1/0; Detector, UV 254 nm. This resulted in to give Example 28 monomer (3.0 g, 3.9 mmol, 85.2%) as a white solid. ESI-LCMS: m/z 765.3 [M+H]⁺; ¹H-NMR (400 MHz, DMSO-d₆): δ 11.44 (s, 1H), 7.71 (dd, J=8.1, 3.8 Hz, 1H), 5.81 (dd, J=4.4, 2.5 Hz, 1H), 5.74-5.53 (m, 5H), 4.59-4.33 (m, 2H), 4.20-4.14 (m, 1H), 3.88-3.53 (m, 4H), 3.39 (d, J=16.2 Hz, 3H), 2.80 (td, J=5.9, 2.9 Hz, 2H), 1.16 (d, J=1.9 Hz, 30H); ³¹P-NMR (162 MHz, DMSO-d₆): δ 147.68, 149.16, 16.84, 16.55.

### Example 29. Synthesis of Monomer

[chemical structure]

[chemical structure]

[0597] Preparation of (2): To a solution of 1 (26.7 g*2, 0.1 mol) in DMF (400 mL) was added sodium hydride (4.8 g, 0.1 mol) for 30 min, then was added CD₃I (16 g, 0.1 mol) at 0° C. for 2.5 hr (ref. for selective 2′-O-alkylation reaction conditions, J. Org. Chem. 1991, 56, 5846-5859). The mixture was stirring at r.t. for another 1 h. LCMS showed the reaction was consumed. The mixture was filtered and the clear solution was evaporated to dryness and was evaporated with CH₃OH. The crude was purified by silica gel column (SiO₂, DCM/MeOH=50:1˜15:1). This resulted in to give the product 2 (35.5 g, 124.6 mmol, 62% yield) as a solid. ESI-LCMS: m/z 285 [M+H]⁺.

[0598] Preparation of (3): To a solution of 2 (35.5 g, 124.6 mmol) in pyridine (360 mL) was added imidazole (29.7 g, 436.1 mmol) and TBSCl (46.9 g, 311.5 mmol). The mixture was stirred at r.t. over night. LCMS showed 2 was consumed completely. The reaction was quenched with water (500 mL). The product was extracted into ethyl acetate (1 L). The organic layer was washed with brine and dried over anhydrous Na₂SO₄. The crude was purified by silica gel column (SiO₂, PE/EA=4:1˜1:1). This resulted in to give the product 3 (20.3 g, 39.6 mmol, 31.8% yield) as a solid. ESI-LCMS: m/z 513 [M+H]⁺; ¹H-NMR (400 MHz, DMSO-d₆): δ 8.32 (m, 1H), 8.13 (m, 1H), 7.31 (m, 2H), 6.02-6.01 (d, J=4.0 Hz, 1H), 4.60-4.58 (m, 1H), 4.49-4.47 (m, 1H), 3.96-3.86 (m, 2H), 3.72-3.68 (m, 1H), 0.91-0.85 (m, 18H), 0.13-0.01 (m, 12H).

[0599] Preparation of (4): To a solution of 3 (20.3 g, 39.6 mmol) in THF (80 mL) was added TFA (20 mL) and water (20 mL) at 0° C. The reaction mixture was stirred at 0° C. for 5 h. LC-MS showed 3 was consumed completely. Con. NH₄OH was added to the mixture at 0° C. to quench the reaction until the pH=7.5. The product was extracted into ethyl acetate (200 mL). The organic layer was washed with brine and dried over anhydrous Na₂SO₄. The solution was then concentrated under reduced pressure and the residue was washed by PE/EA=5:1. This resulted in to give 4 (10.5 g, 26.4 mmol, 66.6% yield) as a white solid. ESI-LCMS: m/z 399 [M+H]⁺; ¹H-NMR (400 MHz, DMSO-d₆): δ 8.41 (m, 1H), 8.14 (m, 1H), 7.37 (m, 2H), 5.99-5.97 (d, J=8.0 Hz, 1H), 5.43 (m, 1H), 4.54-4.44 (m, 2H), 3.97-3.94 (m, 1H), 3.70-3.53 (m, 2H), 0.91 (m, 9H), 0.13-0.12 (m, 6H).

[0600] Preparation of (5): To a solution of 4 (10.5 g, 26.4 mmol) in ACN/H₂O=1:1 (100 mL) was added DAIB (25.4 g, 79.2 mmol) and TEMPO (1.7 g, 7.9 mmol). The reaction mixture was stirred at 40° C. for 2 h. LCMS showed 4 was consumed. The mixture was diluted with EA and water was added. The product was extracted with EA. The organic layer was washed with brine and dried over anhydrous Na₂SO₄. The solution was then concentrated under reduced pressure and the residue was washed by ACN. This resulted in to give 5 (6.3 g, 15.3 mmol, 57.9% yield) as a white solid. ESI-LCMS: m/z 413 [M+H]⁺; ¹H-NMR (400 MHz, DMSO-d₆): δ=8.48 (m, 1H), 8.16 (m, 1H), 7.41 (m, 2H), 6.12-6.10 (d, J=8.0 Hz, 1H), 4.75-4.73 (m, 1H), 4.42-4.36 (m, 2H), 3.17 (m, 6H), 2.07 (m, 2H), 0.93 (m, 9H), 0.17-0.15 (m, 6H).

[0601] Preparation of (6): To a solution of 5 (6.3 g, 15.3 mmol) in toluene (36 mL) and methanol (24 mL) was added (trimethylsilyl)diazomethane (7.0 g, 61.2 mmol) till the yellow color not disappear at r.t. for 2 min. LCMS showed the reaction was consumed. The solvent was removed to give the cured 6 (6.0 g) as a solid which used for the next step. ESI-LCMS: m/z 427 [M+H]⁺; ¹H-NMR (400 MHz, DMSO-d₆): δ 8.45 (m, 1H), 8.15 (m, 1H), 7.35 (m, 2H), 6.12-6.10 (d, J=8.0 Hz, 1H), 4.83-4.81 (m, 1H), 4.50-4.46 (m, 1H), 3.73 (m, 3H), 3.31 (m, 1H), 0.93 (m, 9H), 0.15-0.14 (m, 6H).

[0602] Preparation of (7): To the solution of 6 (6 g) in dry THF/MeOD/D₂O=10/2/1 (78 mL) was added NaBD₄ (2.3 g, 54.8 mmol) at r.t. And the reaction mixture was stirred at r.t for 2.5 hr. After completion of reaction, adjusted pH value to 7 with CH₃COOD, after addition of water, the resulting mixture was extracted with EA (100 mL). The combined organic layer was washed with water and brine, dried over Na₂SO₄, and concentrated to give 7 (5.7 g) which was used for the next step. ESI-LCMS: m/z 401 [M+H]⁺.

[0603] Preparation of (8): To a solution of 7 (5.7 g) in pyridine (60 mL) was added BzCl (10.0 g, 71.3 mmol) under ice bath. The reaction mixture was stirred at r.t. for 2.5 hrs. LCMS showed 7 was consumed. The mixture was diluted with EA and water was added. The product was extracted with EA. The crude was purified by Flash-Prep-HPLC with the following conditions (IntelFlash-1): Column, C18 silica gel; mobile phase, CH₃CN/H₂O (0.5% NH₄HCO₃)=1/1 increasing to CH₃CN/H₂O (0.5% NH₄HCO₃)=1/0 within 25 min, the eluted product was collected at CH₃CN/H₂O (0.5% NH₄HCO₃)=7/3; Detector, UV 254 nm. This resulted in to give the crude 8 (6.2 g, 8.7 mmol, 57% yield, over two steps) as a white solid. ESI-LCMS: m/z 713 [M+H]⁺.

[0604] Preparation of (9): To a solution of 8 (6.2 g, 8.7 mmol) in pyridine (70 mL) and was added 1M NaOH (MeOH/H₂O=4/1) (24 mL). LCMS showed 8 was consumed. The mixture was added saturated NH₄Cl till pH=7.5. The mixture was diluted with water and EA. The organic layer was washed with brine and dried over Na₂SO₄ and concentrated to give the crude. The crude was purified by Flash-Prep-HPLC with the following conditions (IntelFlash-1): Column, C18 silica gel; mobile phase, CH₃CN/H₂O (0.5% NH₄HCO₃)=1/1 increasing to CH₃CN/H₂O (0.5% NH₄HCO₃)=1/0 within 25 min, the eluted product was collected at CH₃CN/H₂O (0.5% NH₄HCO₃)=67/33 Detector, UV 254 nm. This resulted in to give the product 10 (4.3 g, 8.5 mmol, 98% yield) as a white solid. ESI-LCMS: m/z 505 [M+H]⁺; ¹H-NMR (400 MHz, DMSO-d₆): δ 11.23 (m, 1H), 8.77 (m, 2H), 8.06-8.04 (m, 2H), 7.66-7.63 (m, 2H), 7.57-7.53 (m, 3H), 6.16-6.14 (d, J=8.0 Hz, 1H), 5.17 (m, 1H), 4.60-4.52 (m, 2H), 3.34 (m, 1H), 0.93 (m, 9H), 0.14 (m, 6H).

[0605] Preparation of (10): To a stirred solution of 9 (4.3 g, 8.5 mmol) in pyridine (45 mL) were added DMTrCl (3.3 g, 9.8 mmol) at r.t. And the reaction mixture was stirred at r.t for 2.5 hr. With ice-bath cooling, the reaction was quenched with water and the product was extracted into EA. The organic layer was washed with brine and dried over Na₂SO₄ and concentrated to give the crude. The crude was purified by Flash-Prep-HPLC with the following conditions (IntelFlash-1): Column, C18 silica gel; mobile phase, CH₃CN/H₂O (0.5% NH₄HCO₃)=1/1 increasing to CH₃CN/H₂O (0.5% NH₄HCO₃)=1/0 within 25 min, the eluted product was collected at CH₃CN/H₂O (0.5% NH₄HCO₃)=97/3 Detector, UV 254 nm. This resulted in to give the product 10 (6.5 g, 8.1 mmol, 95% yield) as a white solid. ESI-LCMS: m/z 807 [M+H]⁺; ¹H-NMR (400 MHz, DMSO-d₆): δ 11.23 (m, 1H), 8.70-8.68 (m, 2H), 8.04-8.02 (m, 2H), 7.66-7.62 (m, 1H), 7.56-7.52 (m, 2H), 7.35-7.26 (m, 2H), 7.25-7.17 (m, 7H), 6.85-6.82 (m, 4H), 6.18-6.16 (d, J=8.0 Hz, 1H), 4.73-4.70 (m, 1H), 4.61-4.58 (m, 1H), 3.71 (m, 6H), 3.32 (m, 1H), 0.83 (m, 9H), 0.09-0.03 (m, 6H).

[0606] Preparation of (11): To a solution of 10 (3.5 g, 4.3 mmol) in THF (35 mL) was added 1 M TBAF solution (5 mL). The reaction mixture was stirred at r.t. for 1.5 h. LCMS showed 10 was consumed completely. Water (100 mL) was added. The product was extracted with EA (100 mL) and the organic layer was washed with brine and dried over Na₂SO₄. Then the organic layer was concentrated to give a residue which was purified by Flash-Prep-HPLC with the following conditions (IntelFlash-1): Column, C18 silica gel; mobile phase, CH₃CN/H₂O (0.5% NH₄HCO₃)=2/3 increasing to CH₃CN/H₂O (0.5% NH₄HCO₃)=1/0 within 20 min, the eluted product was collected at CH₃CN/H₂O (0.5% NH₄HCO₃)=62/38; Detector, UV 254 nm. This resulted in to give 11 (2.7 g, 3.9 mmol, 90.7%) as a white solid. ESI-LCMS: m/z 693 [M+H]⁺.

[0607] Preparation of Example 29 monomer: To a suspension of 11 (2.7 g, 3.9 mmol) in DCM (30 mL) was added DCI (0.39 g, 3.3 mmol) and CEP[N(iPr)₂]₂ (1.4 g, 4.7 mmol). The mixture was stirred at r.t. for 2 h. LC-MS showed 11 was consumed completely. The solution was washed with water twice and washed with brine and dried over Na₂SO₄. Then concentrated to give a residue which was purified by Flash-Prep-HPLC with the following conditions (IntelFlash-1): Column, C18 silica gel; mobile phase, CH₃CN/H₂O (0.5% NH₄HCO₃)=1/1 increasing to CH₃CN/H₂O (0.5% NH₄HCO₃)=1/0 within 20 min, the eluted product was collected at CH₃CN/H₂O (0.5% NH₄HCO₃)=73/27; Detector, UV 254 nm. This resulted in to give Example 29 monomer (3.3 g, 3.7 mmol, 94.9%) as a white solid. ESI-LCMS: m/z 893 [M+H]⁺; ¹H-NMR (400 MHz, DMSO-d₆): δ=11.24 (m, 1H), 8.66-8.64 (m, 2H), 8.06-8.03 (m, 2H), 7.65-7.53 (m, 3H), 7.42-7.38 (m, 2H), 7.37-7.34 (m, 2H), 7.25-7.19 (m, 7H), 6.86-6.80 (m, 4H), 6.20-6.19 (d, J=4.0 Hz, 1H), 4.78 (m, 2H), 4.22-4.21 (m, 1H), 3.92-3.83 (m, 1H), 3.72 (m, 6H), 3.62-3.57 (m, 3H), 2.81-2.78 (m, 1H), 2.64-2.61 (m, 1H), 1.17-1.04 (m, 12H); ³¹P-NMR (162 MHz, DMSO-d₆): δ 149.51, 149.30.

### Example 30. Synthesis of Monomer

[chemical structure]

[chemical structure]

[0608] Preparation of (3): To the solution of 1 (70 g, 138.9 mmol) in dry acetonitrile (700 mL) was added 2 (27.0 g, 166.7 mmol), BSA (112.8 g, 555.5 mmol). The mixture was stirred at 50° C. for 1 h. Then the mixture was cooled to −5° C. and TMSOTf (46.2 g, 208.3 mmol) slowly added to the mixture. Then the reaction mixture was stirred at r.t for 48 h. Then the solution was cooled to 0° C. and saturated aq. NaHCO₃ was added and the resulting mixture was extracted with EA. The combined organic layer was washed with water and brine, dried over Na₂SO₄, and concentrated under reduced pressure to give a residue which was purified by silica gel column chromatography (eluent, PE:EA-3:1˜1:1) to give 3 (70 g, 115.3 mmol, 81.6%) as a white solid. ESI-LCMS: m/z 605 [M−H]⁺.

[0609] Preparation of (4): To the solution of 3 (70.0 g, 115.3 mmol) in methylammonium solution (1 M, 700 mL), and the reaction mixture was stirred at 40° C. for 15 h. After completion of reaction, the resulting mixture was concentrated. The residue was crystallized from EA. Solid was isolated by filtration, washed with PE and dried overnight at 45° C. in vacuum to give 4 (31.0 g, 105.4 mmol, 91.1%) as a white solid. ESI-LCMS: m/z 295 [M+H]⁺; ¹H-NMR (400 MHz, DMSO): δ 11.63 (s, 1H), 8.07-7.99 (m, 1H), 7.81 (d, J=8.4 Hz, 1H), 7.72-7.63 (m, 1H), 7.34-7.26 (m, 1H), 6.18 (d, J=6.4 Hz, 1H), 5.24 (s, 1H), 5.00 (s, 2H), 4.58-4.47 (m, 1H), 4.19-4.10 (m, 1H), 3.85-3.77 (m, 1H), 3.75-3.66 (m, 1H), 3.66-3.57 (m, 1H).

[0610] Preparation of (5): To the solution of 4 (20.0 g, 68.0 mmol) in dry DMF (200 mL) was added DPC (18.9 g, 88.0 mmol) and NaHCO₃ (343 mg, 4 mmol) at r.t, and the reaction mixture was stirred at 150° C. for 35 min. After completion of reaction, the resulting mixture was poured into tert-Butyl methyl ether (4 L). Solid was isolated by filtration, washed with PE and dried in vacuum to give crude 5 (21.0 g) as a brown solid which was used directly for next step (ref for 5, Journal of Organic Chemistry, 1989, vol. 33, p. 1219-1225). ESI-LCMS: m/z 275 [M−H]⁻.

[0611] Preparation of (6): To the solution of 5 (crude, 21.0 g) in Pyridine (200 mL) was added AgNO₃ (31.0 g, 180.0 mmol) and collidine (88.0 g, 720 mmol) and TrtCl (41.5 g, 181 mmol) at r.t, and the reaction mixture was stirred at r.t for 15 h. After addition of water, the resulting mixture was extracted with EA. The combined organic layer was washed with water and brine, dried over Na₂SO₄, and concentrated to give the crude. The crude was by Flash-Prep-HPLC with the following conditions (IntelFlash-1): Column, C18 silica gel; mobile phase, CH₃CN/H₂O (0.5% NH₄HCO₃)=1/1 increasing to CH₃CN/H₂O (0.5% NH₄HCO₃)=1/0 within 20 min, the eluted product was collected at CH₃CN/H₂O (0.5% NH₄HCO₃)=1/0; Detector, UV 254 nm. This resulted in to give 6 (10.0 g, 13.1 mmol, 20% yield over 3 steps) as a white solid. ESI-LCMS: m/z 761 [M+H]⁺.

[0612] Preparation of (7): To the solution of 6 (10.0 g, 13.1 mmol) in THF (100 mL) was added 6 N NaOH (30 mL) at r.t, and the reaction mixture was stirred at r.t for 1 hr. After addition of NH₄Cl, the resulting mixture was extracted with EA. The combined organic layer was washed with water and brine, dried over Na₂SO₄, and concentrated under reduced pressure and the residue was purified by Flash-Prep-HPLC with the following conditions (IntelFlash-1): Column, C18 silica gel; mobile phase, CH₃CN/H₂O (0.5% NH₄HCO₃)=1/1 increasing to CH₃CN/H₂O (0.5% NH₄HCO₃)=1/0 within 20 min, the eluted product was collected at CH₃CN/H₂O (0.5% NH₄HCO₃)=9/1; Detector, UV 254 nm. This resulted in to give 7 (9.3 g, 11.9 mmol, 90%) as a white solid. ESI-LCMS: m/z 777 [M−H]⁻; ¹H-NMR (400 MHz, DMSO-d₆): δ 11.57 (s, 1H), 8.02 (d, J=8.7 Hz, 1H), 7.88-7.81 (m, 1H), 7.39-7.18 (m, 30H), 7.09-6.99 (m, 30H), 6.92-6.84 (m, 30H), 6.44 (d, J=4.0 Hz, 1H), 4.87 (d, J=4.0 Hz, 1H), 4.37-4.29 (m, 1H), 4.00-3.96 (m, 1H), 3.76-3.70 (m, 1H), 3.22-3.13 (m, 1H), 3.13-3.04 (m, 1H).

[0613] Preparation of (8): To the solution of 7 (8.3 g, 10.7 mmol) in dry DCM (80 mL) was added Pyridine (5.0 g, 64.2 mmol) and DAST (6.9 g, 42.8 mmol) at 0° C., and the reaction mixture was stirred at r.t for 15 hr. After addition of NH₄Cl, the resulting mixture was extracted with DCM. The combined organic layer was washed with water and brine, dried over Na₂SO₄, and concentrated under reduced pressure and the residue was purified by Flash-Prep-HPLC with the following conditions (IntelFlash-1): Column, C18 silica gel; mobile phase, CH₃CN/H₂O (0.5% NH₄HCO₃)=1/1 increasing to CH₃CN/H₂O (0.5% NH₄HCO₃)=1/0 within 20 min, the eluted product was collected at CH₃CN/H₂O (0.5% NH₄HCO₃)=1/0; Detector, UV 254 nm. This resulted in to give 8 (6.8 g, 8.7 mmol, 81.2%) as a white solid. ESI-LCMS: m/z 779 [M−H]⁺; ¹⁹F-NMR (376 MHz, DMSO-d₆): δ −183.05.

[0614] Preparation of (9): To the solution of 8 (5.8 g, 7.5 mmol) in dry ACN (60 mL) was added TEA (1.5 g, 15.1 mmol), DMAP (1.84 g, 15.1 mmol) and TPSCl (4.1 g, 13.6 mmol) at r.t, and the reaction mixture was stirred at room temperature for 3 h under N₂ atmosphere. After completion of reaction, the mixture was added NH₃·H₂O (12 mL). After addition of water, the resulting mixture was extracted with EA. The combined organic layer was washed with water and brine, dried over Na₂SO₄, and concentrated under reduced pressure and the residue was purified by Flash-Prep-HPLC with the following conditions (IntelFlash-1): Column, C18 silica gel; mobile phase, CH₃CN/H₂O (0.5% NH₄HCO₃)=1/1 increasing to CH₃CN/H₂O (0.5% NH₄HCO₃)=1/0 within 20 min, the eluted product was collected at CH₃CN/H₂O (0.5% NH₄HCO₃)=1/0; Detector, UV 254 nm. This resulted in to give 9 (5.5 g, 7 mmol, 90.2%) as a white solid. ESI-LCMS: m/z 780 [M+H]⁺.

[0615] Preparation of (10): To a solution of 9 (5.5 g, 7 mmol) in DCM (50 mL) with an inert atmosphere of nitrogen was added pyridine (5.6 g, 70.0 mmol) and BzCl (1.2 g, 8.5 mmol) in order at 0° C. The reaction solution was stirred for 30 minutes at room temperature. The solution was diluted with DCM (100 mL) and the combined organic layer was washed with water and brine, dried over Na₂SO₄, and concentrated under reduced pressure to give a residue which was purified by silica gel column chromatography (eluent, PE:EA=5:1˜2:1) to give 10 (5.4 g, 6.1 mmol, 90.6%) as a white solid. ESI-LCMS: m/z 884 [M+H]⁺; ¹⁹F-NMR (376 MHz, DMSO-d₆): δ −183.64.

[0616] Preparation of (11): To the solution of 10 (5.4 g, 6.1 mmol) in the solution of DCA (6%) in DCM (60 mL) was added TES (15 mL) at r.t, and the reaction mixture was stirred at room temperature for 5-10 min. After completion of reaction, the resulting mixture was added NaHCO₃, the resulting mixture was extracted with DCM. The combined organic layer was washed with water and brine, dried over Na₂SO₄, and concentrated under reduced pressure and the residue was crystallized from EA. Solid was isolated by filtration, washed with PE and dried overnight at 45° in vacuum to give 11 (2.0 g, 5.0 mmol, 83.2%) as a white solid. ESI-LCMS: m/z 400 [M+H]⁺.

[0617] Preparation of (12): To a solution of 11 (2.0 g, 5.0 mmol) in dry Pyridine (20 mL) was added DMTrCl (2.0 g, 6.0 mmol). The reaction mixture was stirred at r.t. for 2.5 h. LCMS showed 11 was consumed and water (200 mL) was added. The product was extracted with EA (200 mL) and the organic layer was washed with brine and dried over Na₂SO₄ and concentrated to give the crude. The crude was purified by c.c. (PE:EA=4:1˜1:1) to give crude 12. The crude was further purified by Flash-Prep-HPLC with the following conditions (IntelFlash-1): Column, C18 silica gel; mobile phase, CH₃CN/H₂O (0.5% NH₄HCO₃)=1/1 increasing to CH₃CN/H₂O (0.5% NH₄HCO₃)=1/0 within 20 min, the eluted product was collected at CH₃CN/H₂O (0.5% NH₄HCO₃)=1/0; Detector, UV 254 nm. This resulted in to give 12 (2.1 g, 3 mmol, 60%) as a white solid. ESI-LCMS: m/z 702 [M+H]⁺; ¹H-NMR (400 MHz, DMSO-d₆): δ 12.63 (s, 1H), 8.54 (d, J=7.8 Hz, 1H), 8.25 (d, J=7.2 Hz, 2H), 7.82 (d, J=3.6 Hz, 2H), 7.67-7.58 (m, 1H), 7.57-7.49 (m, 2H), 7.49-7.39 (m, 1H), 7.39-7.31 (m, 2H), 7.27-7.09 (m, 7H), 6.82-6.69 (m, 4H), 6.23 (d, J=26.1 Hz, 1H), 5.59-5.49 (m, 1H), 4.83-4.61 (m, 1H), 4.15-4.01 (m, 1H), 3.74-3.59 (m, 6H), 3.33-3.28 (m, 1H), 3.16-3.05 (m, 1H). ¹⁹F-NMR (376 MHz, DMSO-d₆): δ −191.66.

[0618] Preparation of Example 30 monomer: To a suspension of 12 (2.1 g, 3.0 mmol) in DCM (20 mL) was added DCI (310 mg, 2.6 mmol) and CEP[N(iPr)₂]₂ (1.1 g, 3.7 mmol). The mixture was stirred at r.t. for 1 h. LC-MS showed 12 was consumed completely. The solution was washed with water twice and washed with brine and dried over Na₂SO₄. Then concentrated to give the crude. The crude was by Flash-Prep-HPLC with the following conditions (IntelFlash-1): Column, C18 silica gel; mobile phase, CH₃CN/H₂O (0.5% NH₄HCO₃)=1/1 increasing to CH₃CN/H₂O (0.5% NH₄HCO₃)=1/0 within 20 min, the eluted product was collected at CH₃CN/H₂O (0.5% NH₄HCO₃)=1/0; Detector, UV 254 nm. This resulted in to give Example 30 monomer (2.1 g, 2.3 mmol, 80.0%) as a white solid. ESI-LCMS: m/z 902 [M+H]⁺. ¹H-NMR (400 MHz, DMSO-d₆): δ 12.64 (s, 1H), 8.54 (d, J=7.6 Hz, 1H), 8.24 (d, J=7.7 Hz, 2H), 7.93-7.88 (m, 2H), 7.67-7.58 (m, 1H), 7.56-7.42 (m, 3H), 7.41-7.29 (m, 2H), 7.27-7.08 (m, 7H), 6.82-6.64 (m, 4H), 6.37-6.18 (m, 1H), 6.03-5.72 (m, 1H), 5.26-4.83 (m, 1H), 4.28-4.12 (m, 1H), 3.88-3.72 (m, 1H), 3.71-3.37 (m, 9H), 3.15-3.00 (m, 1H), 2.83-2.75 (m, 1H), 2.66-2.57 (m, 1H), 1.21-0.88 (m, 12H). ¹⁹F-NMR (376 MHz, DMSO-d₆): δ −189.71. ³¹P-NMR (162 MHz, DMSO-d₆): δ 149.48, 149.50, 148.95, 148.88.

### Example 31. Synthesis of Monomer

[chemical structure]

[chemical structure]

[0619] Preparation of (2): To a solution of 1 (40.0 g, 79.3 mmol), 1a (7.6 g, 80.1 mmol) in ACN (100 mL). Then added BSA (35.2 g, 174.4 mmol) under N₂ atmosphere. The mixture was stirred at 50° C. for 1 h until the solution was clear. Then cool down to 0° C. and dropped TMSOTf (18.5 g, 83.2 mmol). The mixture was stirred at 75° C. for 1 h, TLC showed 1 was consumed completely. Then the solution was diluted with EA, washed with H₂O twice. The solvent was concentrated under reduced pressure and the residue was used for next step. ESI-LCMS: m/z 540 [M+H]⁺.

[0620] Preparation of (3): To a solution of 2 (37.1 g, 68.7 mmol) in 30% CH₂NH₂/MeOH solution (200 mL). The mixture was stirred at 25° C. for 2 h. TLC showed 2 was consumed completely. The solvent was concentrated under reduced pressure and the residue was washed with EA twice to give 3 (12.5 g, 55.2 mmol) (ref. for intermediate 3 Bioorganic & Medicinal Chemistry Letters, 1996, Vol. 6, No. 4, pp. 373-378) which was used directly for the next step. ESI-LCMS: m/z 228 [M+H]⁺.

[0621] Preparation of (4): To a solution of 3 (12.5 g, 55.2 mmol) in pyridine (125 mL) and added DMAP (1.3 g, 11.0 mmol), TrtCl (30.7 g, 110.5 mmol). The mixture was stirred at r.t. for 24 h. TLC showed 3 was consumed completely. H₂O was added to the mixture. Then filtered and the solution diluted with EA. The organic layer was washed with NaHCO₃ and brine. The solvent was concentrated under reduced pressure and then added ACN, filtered to give 4a (17.0 g, 35.4 mmol, 64% yield) as a white solid.

[0622] To a solution of 4a (17.0 g, 35.4 mmol) in DMF (200 mL), collidine (5.2 g, 43.5 mmol), TrCl (13.1 g, 47.1 mmol) were added after 2 h and then again after 3 h TrCl (13.1 g, 47.1 mmol), AgNO3 (8.0 g, 47.1 mmol). The mixture was stirred at 25° C. for 24 h. TLC showed 4a was consumed completely. Then filtered and the solution diluted with EA. The organic layer was washed with NaHCO₃ and brine. The solvent was concentrated under reduced pressure and then added ACN, filtered to get 4 (14.2 g, 19.5 mmol, 54% yield) as a white solid. ESI-LCMS: m/z 712 [M+H]⁺; ¹H-NMR (400 MHz, DMSO-d₆): δ 7.83 (d, J=8 Hz, 2H), 7.42-7.20 (m, 30H), 6.18 (d, J=7 Hz, 1H), 6.09 (d, J=8 Hz, 2H), 5.60 (d, J=7 Hz, 1H), 4.22 (m, 1H), 3.90 (d, J=5 Hz, 1H), 2.85 (d, J=10 Hz, 1H), 2.76 (s, 1H), 2.55-2.50 (dd, 1H).

[0623] Preparation of (5): To a solution of 4 (14.2 g, 19.9 mmol) in DCM (150 mL), DMAP (2.4 g, 19.9 mmol), TEA (4.0 g, 39.9 mmol, 5.6 mL) were added. Then cool down to 0° C., TfCl (6.7 g, 39.9 mmol) dissolved in DCM (150 mL) were dropped. The mixture was stirred at 25° C. for 1 h. TLC showed 4 was consumed completely. Then filtered and the solution diluted with EA. The organic layer was washed with NaHCO₃ and brine. The solvent was concentrated under reduced pressure to get 5 (16.8 g, 19.9 mmol) as a brown solid. ESI-LCMS: m/z 844 [M+H]⁺.

[0624] Preparation of (6): To a solution of 5 (16.8 g, 19.9 mmol) in DMF (200 mL), KOAc (9.7 g, 99.6 mmol) were added, The mixture was stirred at 25° C. for 14 h and 50° C. for 3 h, TLC showed 5 was consumed completely. Then filtered and the solution diluted with EA. The organic layer was washed with H₂O and brine. The solvent was concentrated under reduced pressure to get 6a (15.0 g, 18.9 mmol, 90% yield) as a brown solid. To a solution of 6a (15.0 g, 19.9 mmol) in 30% CH₃NH₂/MeOH solution (100 mL) were added. The mixture was stirred at 25° C. for 2 h, TLC showed 6a was consumed completely. Then the solvent was concentrated under reduced pressure and the residue was purified by cc (0-5% MeOH in DCM) to give 6 (11.6 g, 16.3 mmol, 82% yield) as a yellow solid. ESI-LCMS: m/z 712 [M+H]⁺; ¹H-NMR (400 MHz, DMSO-d₆): δ 7.59 (d, J=8 Hz, 2H), 7.37-7.22 (m, 30H), 6.01 (d, J=8 Hz, 2H), 5.84 (d, J=3 Hz, 1H), 5.42 (d, J=4 Hz, 1H), 3.78-3.70 (m, 3H), 3.10 (t, J=9 Hz, 1H), 2.53 (d, J=4 Hz, 6H), 1.77 (s, 6H).

[0625] Preparation of (7): To a solution of 6 (11.6 g, 16.32 mmol) in DCM (200 mL), DAST (7.9 g, 48.9 mmol) were added at 0° C., The mixture was stirred at 25° C. for 16 h, TLC showed 6 was consumed completely. Then the solution was diluted with EA, washed with NaHCO₃ twice, The solvent was concentrated under reduced pressure the residue purified by Flash-Prep-HPLC with the following conditions (IntelFlash-1): Column, C18 silica gel; mobile phase, CH₃CN/H₂O (0.5% NH₄HCO₃)=1/1 increasing to CH₃CN/H₂O (0.5% NH₄HCO₃)=1/0 within 25 min, the eluted product was collected at CH₃CN/H₂O (0.5% NH₄HCO₃)=4/1; Detector, UV 254 nm. This resulted in to give 7 (11.6 g, 13.8 mmol, 84% yield) as a white solid. ESI-LCMS: m/z 714 [M+H]⁺.

[0626] Preparation of (8): To a solution of 7 (11.6 g, 16.2 mmol) in DCM (100 mL) was added TFA (10 mL). The mixture was stirred at 20° C. for 1 h. TLC showed 7 was consumed completely. Then the solution was concentrated under reduced pressure the residue was purified by silica gel column (0˜20% MeOH in DCM) and Flash-Prep-HPLC with the following conditions (IntelFlash-1): Column, C18 silica gel; mobile phase, CH₃CN/H₂O (0.5% NH₄HCO₃)=0/1 increasing to CH₃CN/H₂O (0.5% NH₄HCO₃)=1/3 within 25 min, the eluted product was collected at CH₃CN/H₂O (0.5% NH₄HCO₃)=0/1; Detector, UV 254 nm. This resulted in to give 9 (1.7 g, 7.2 mmol, 45% yield) as a white solid. ESI-LCMS: m/z 229.9 [M+H]⁺; ¹H-NMR (400 MHz, DMSO-d₆): δ 7.91 (d, J=8 Hz, 2H), 6.14 (d, J=8 Hz, 2H), 5.81-5.76 (m, 2H), 5.28 (t, J=5 Hz, 1H), 5.13-4.97 (t, J=4 Hz, 1H), 4.23 (m, 1H), 3.97 (m, 1H), 3.74-3.58 (m, 2H); ¹⁹F-NMR (376 MHz, DMSO-d₆): δ −206.09.

[0627] Preparation of (9): To a solution of 8 (1.4 g, 6.1 mmol) in pyridine (14 mL) was added DMTrCl (2.5 g, 7.3 mmol) at 20° C. The mixture was stirred at 20° C. for 1 h. TLC showed 8 was consumed completely. Water was added to the reaction. The product was extracted with EA, The organic layer was washed with NaHCO₃ and brine. Then the solution was concentrated under reduced pressure and the residue was purified by Flash-Prep-HPLC with the following conditions (IntelFlash-1): Column, C18 silica gel; mobile phase, CH₃CN/H₂O (0.5% NH₄HCO₃)=1/3 increasing to CH₃CN/H₂O (0.5% NH₄HCO₃)=4/1 within 25 min, the eluted product was collected at CH₃CN/H₂O (0.5% NH₄HCO₃)=1/1; Detector, UV 254 nm. This resulted in to give 9 (2.5 g, 4.6 mmol, 76 yield) as a white solid. ESI-LCMS: m/z 532.2 [M+H]⁺; ¹H-NMR (400 MHz, DMSO-d₆): δ 7.87-7.84 (m, 2H), 7.40-7.22 (m, 9H), 6.91-6.87 (m, 4H), 5.98-5.95 (m, 2H), 5.88-5.77 (m, 2H), 5.16-5.02 (m, 1H), 4.42 (m, 1H), 4.05 (m, 1H), 3.74 (s, 6H), 3.35 (m, 2H); ¹⁹F-NMR (376 MHz, DMSO-d₆): δ −202.32.

[0628] Preparation of Example 31 monomer: To a solution of 9 (2.2 g, 4.1 mmol) in DCM (20 mL) was added DCI (415 mg, 3.5 mmol) and CEP (1.5 g, 4.9 mmol) under N₂ pro. The mixture was stirred at 20° C. for 0.5 h. TLC showed 9 was consumed completely. The product was extracted with DCM, The organic layer was washed with H₂O and brine. Then the solution was concentrated under reduced pressure and the residue was purified by Flash-Prep-HPLC with the following conditions (IntelFlash-1): Column, C18 silica gel; mobile phase, CH₃CN/H₂O (0.5% NH₄HCO₃)=1/3 increasing to CH₃CN/H₂O (0.5% NH₄HCO₃)=1/0 within 25 min, the eluted product was collected at CH₃CN/H₂O (0.5% NH₄HCO₃)=1/0; Detector, UV 254 nm. This resulted in to give Example 31 monomer (2.6 g, 3.5 mmol, 85% yield) as a white solid. ESI-LCMS: m/z 732.2 [M+H]⁺; ¹H-NMR (400 MHz, DMSO-d₆): δ 7.87-7.84 (m, 2H), 7.40-7.22 (m, 9H), 6.91-6.87 (m, 4H), 5.98-5.95 (m, 2H), 5.90-5.88 (m, 1H), 5.30-5.17 (m, 1H), 4.62 (m, 1H), 4.19 (m, 1H), 3.78-3.73 (m, 7H), 3.62-3.35 (m, 5H), 2.78 (t, J=5 Hz, 1H), 2.63 (t, J=6 Hz, 1H), 1.14-0.96 (m, 12H); ¹⁹F-NMR (376 MHz, DMSO-d₆): δ −200.77, 200.80, 201.62, 201.64. ³¹P-NMR (162 MHz, DMSO-d₆): δ 150.31, 150.24, 149.66, 149.60.

### Example 32. Synthesis of End Cap Monomer

[chemical structure]

[0629] Preparation of (8): To a stirred solution of 7 (13.4 g, 35.5 mmol, Scheme 5) in DMSO (135 mL) were added EDCI (6.3 g, 32.9 mmol) and pyridine (0.9 g, 10.9 mmol), TFA (0.6 g, 5.5 mmol) at r.t. And the reaction mixture was stirred at r.t for 2 h. LCMS showed 7 consumed completely. The reaction was quenched with water and the product was extracted with EA (1800 mL). The organic phase was washed by brine, dried over Na₂SO₄, The organic phase was evaporated to dryness under reduced pressure to give a residue 8 (13.2 g, 35.3 mmol, 99.3% yield). Which was used directly to next step. ESI-LCMS: m/z=375 [M+H₂O]⁺

[0630] Preparation of (10): A solution of 8 (13.2 g, 35.3 mmol), 9 (26.8 g, 42.3 mmol, Scheme 18) and K₂CO₃ (19.5 g, 141.0 mmol) in dry THF (160 mL) and D₂O (53 mL) was stirred at r.t. 17 h. LCMS showed most of 8 was consumed. The product was extracted with EA (2500 mL) and the organic layer was washed with brine and dried over Na₂SO₄. Then the organic layer was concentrated to give a residue which was purified by c.c. (PE:EA=10:1 ˜1:2) to give product 10 (8.1 g, 11.8 mmol, 33.4% yield) as a white solid. ESI-LCMS m/z=682 [M+H]⁺; ¹H-NMR (400 MHz, DMSO-d₆): δ 11.42 (s, 1H), 7.69-7.71 (d, J=8.1 Hz, 1H), 5.78-5.79 (d, J=3.7 Hz, 1H), 5.65-5.67 (m, 1H), 5.59-5.63 (m, 4H), 4.29-4.35 (m, 2H), 3.97-3.99 (m, 1H), 1.15 (s, 18H), 0.87 (s, 9H), 0.07-0.08 (d, J=5.1 Hz, 6H). ³¹P-NMR (162 MHz, DMS O-d₆) δ 16.62.

[0631] Preparation of (11): To a round-bottom flask was added 10 (7.7 g, 11.1 mmol) in a mixture of HCOOH (80 mL) and H₂O (80 mL). The reaction mixture was stirred at 40° C. for 3 h. LCMS showed the 10 was consumed completely. The reaction mixture was adjusted the pH=7.0 with con·NH₃·H₂O (100 mL). Then the mixture was extracted with DCM (100 mL*3). The combined DCM layer was dried over Na₂SO₄. Filtered and filtrate was concentrated to give crude which was purified by Flash-Prep-HPLC with the following conditions (IntelFlash-1): Column, C18 silica gel; mobile phase, CH₃CN/H₂O (0.5% NH₄HCO₃)=1/2 increasing to CH₃CN/H₂O (0.5% NH₄HCO₃)=1/1 within 20 min, the eluted product was collected at CH₃CN/H₂O (0.5% NH₄HCO₃)=1/0; Detector, UV 254 nm. To give product 11 (5.5 g, 9.6 mmol, 86.1% yield) as a white solid. ESI-LCMS m/z=568 [M+H]⁺; ¹H-NMR (400 MHz, DMSO-d₆): δ 11.42 (s, 1H, exchanged with D₂O), 7.62-7.64 (d, J=8.1, 1H), 5.81-5.82 (d, J=4.3, 1H), 5.58-5.66 (m, 5H), 5.52-5.53 (d, J=6.6, 1H), 4.34-4.37 (m, 1H), 4.09-4.13 (m, 1H), 3.94-3.96 (t, J=9.7, 1H), 1.15 (s, 18H), 0 (s, 1H). ³¹P NMR (162 MHz, DMSO-d₆) δ 17.16.

[0632] Preparation of Example 32 monomer: To a solution of 11 (5.3 g, 9.3 mmol) in DCM (40 mL) was added the DCI (1.1 g, 7.9 mmol), then CEP[N(ipr)₂]₂ (3.4 g, 11.2 mmol) was added. The mixture was stirred at r.t. for 1 h. LCMS showed 11 consumed completely. The reaction mixture was washed with H₂O (50 mL*2) and brine (50 mL*1). Dried over Na₂SO₄ and concentrated to give crude which was purified by Flash-Prep-HPLC with the following conditions (IntelFlash-1): Column, C18 silica gel; mobile phase, CH₃CN/H₂O (0.5% NH₄HCO₃)=1/3 increasing to CH₃CN/H₂O (0.5% NH₄HCO₃)=1/0 within 20 min, the eluted product was collected at CH₃CN/H₂O (0.5% NH₄HCO₃)=1/0; Detector, UV 254 nm. The product was concentrated to give Example 32 monomer (6.2 g, 8.0 mmol, 85.6% yield) as a white solid. ESI-LCMS m/z=768 [M+H]⁺; ¹H-NMR (400 MHz, DMSO-d₆): δ 11.43 (s, 1H), 7.68-7.71 (m, 1H), 5.79-5.81 (m, 1H), 5.58-5.67 (m, 5H), 4.34-4.56 (m, 2H), 4.14-4.17 (m, 1H), 3.54-3.85 (m, 4H), 2.78-2.81 (m, 2H), 1.13-1.17 (m, 30H). ³¹P-NMR (162 MHz, DMSO-d₆): δ 149.66, 149.16, 16.84, 16.56.

### Example 33. Synthesis of Monomer

[chemical structure]

[chemical structure]

[chemical structure]

[0633] Preparation of (2): To a solution of 1 (20.0 g, 66.4 mmol) in dry DMF (400 mL) was added sodium hydride (1.9 g, 79.7 mmol) for 30 min, then was added CD₃I (9.1 g, 79.7 mmol) in dry DCM (40 mL) at −20° C. for 5.5 hr. LCMS showed the reaction was consumed. The mixture was filtered and the clear solution was evaporated to dryness and was evaporated with CH₃OH. The crude was purified by silica gel column (SiO₂, DCM/MeOH=50:1˜10:1). This resulted in to give the product 2 (7.5 g, 23.5 mmol, 35.5% yield) as a solid. ESI-LCMS: m/z 319 [M+H]⁺; ¹H-NMR (400 MHz, DMSO-d₃): δ=8.38 (m, 1H), 6.97 (m, 2H), 5.93-5.81 (m, 1H), 5.27-5.26 (d, J=4 Hz, 1H), 5.13-5.11 (m, 1H), 4.39-4.31 (m, 1H), 4.31-4.25 (m, 1H), 3.96-3.94 (m, 1H), 3.66-3.63 (m, 1H), 3.63-3.56 (m, 1H).

[0634] Preparation of (3): To a solution of 2 (7.5 g, 23.5 mmol) in dry DMF (75 mL) was added Imidazole (5.6 g, 82.3 mmol) and TBSCl (8.9 g, 58.8 mmol). The mixture was stirred at r.t. over night. LCMS showed 2 was consumed completely. The reaction was quenched with water (300 mL). The product was extracted into ethyl acetate (100 mL). The organic layer was washed with brine and dried over anhydrous Na₂SO₄. The solvent was removed to give the cured 3 (9.8 g) as a solid which used for the next step. ESI-LCMS: m/z 547 [M+H]⁺.

[0635] Preparation of (4): To a solution of 3 (9.8 g) in THF (40 mL) was added TFA (10 mL) and water (10 mL) at 0° C. The reaction mixture was stirred at 0° C. for 5 h. LC-MS showed 3 was consumed completely. Con. NH₄OH was added to the mixture at 0° C. to quench the reaction until the pH=7.5. The product was extracted into ethyl acetate (200 mL). The organic layer was washed with brine and dried over anhydrous Na₂SO₄. The solvent was removed to give the cured 4 (8.4 g) as a solid which used for the next step. ESI-LCMS: m/z 433 [M+H]⁺.

[0636] Preparation of (5): To a solution of 4 (8.4 g) in DCM/H₂O=2:1 (84 mL) was added DAIB (18.8 g, 58.4 mmol) and TEMPO (0.87 g, 5.8 mmol). The reaction mixture was stirred at 40° C. for 2 h. LCMS showed 4 was consumed. The mixture was diluted with DCM and water was added. The product was extracted with DCM. The organic layer was washed with brine and dried over anhydrous Na₂SO₄. The solution was then concentrated under reduced pressure. This resulted in to give 5 (14.4 g) as a white solid. ESI-LCMS: m/z 447 [M+H]⁺.

[0637] Preparation of (6): To a solution of 5 (14.4 g) in toluene (90 mL) and methanol (60 mL) was added 2M TMSCHN₂ (8.9 g, 78.1 mmol) till the yellow color not disappear at r.t. for 10 min. LCMS showed 5 was consumed. The crude was purified by Flash-Prep-HPLC with the following conditions (IntelFlash-1): Column, C18 silica gel; mobile phase, CH₃CN/H₂O (0.5% NH₄HCO₃)=1/1 increasing to CH₃CN/H₂O (0.5% NH₄HCO₃)=1/0 within 25 min, the eluted product was collected at CH₃CN/H₂O (0.5% NH₄HCO₃)=65/35 Detector, UV 254 nm. This resulted in to give the product 6 (3.5 g, 7.6 mmol, 32.3% yield over three steps, 70% purity) as a white solid. ESI-LCMS: m/z 461 [M+H]⁺.

[0638] Preparation of (7): To the solution of 6 (3.5 g, 7.6 mmol) in dry THF/MeOD/D₂O=10/2/1 (45 mL) was added NaBD₄ (0.96 g, 22.8 mmol). And the reaction mixture was stirred at r.t for 2.5 hr. After completion of reaction, the resulting mixture was added CH₃COOD to pH=7, after addition of water, the resulting mixture was extracted with EA (100 mL). The combined organic layer was washed with water and brine, dried over Na₂SO₄, and concentrated to give 7 (3.3 g) which was used for the next step. ESI-LCMS: m/z 435 [M+H]⁺.

[0639] Preparation of (8): To a solution of 7 (3.3 g) in dry DCM (30 mL) was added pyridine (5.9 g, 74.5 mmol) and iBuCl (2.4 g, 22.4 mmol) in DCM (6 mL) under ice bath. The reaction mixture was stirred at 0° C. for 2.5 hr. LCMS showed 7 was consumed. The mixture was diluted with EA and water was added. The product was extracted with EA. The crude was purified by Flash-Prep-HPLC with the following conditions (IntelFlash-1): Column, C18 silica gel; mobile phase, CH₃CN/H₂O (0.5% NH₄HCO₃)=1/1 increasing to CH₃CN/H₂O (0.5% NH₄HCO₃)=1/0 within 25 min, the eluted product was collected at CH₃CN/H₂O (0.5% NH₄HCO₃)=87/13; Detector, UV 254 nm. This resulted in to give the crude 8 (1.6 g, 2.8 mmol, 36.8% yield over two steps) as a white solid. ESI-LCMS: m/z 575 [M+H]⁺.

[0640] Preparation of (9): To a solution of 8 (1.6 g, 2.8 mmol) in H₂O/dioxane=1:1 (30 ml) was added K₂CO₃ (772.8 mg, 5.6 mmol) and DABCO (739.2 mg, 2.9 mmol). The reaction mixture was stirred at 50° C. for 3 hr. LCMS showed 8 was consumed. The mixture was diluted with EA and water was added. The product was extracted with EA. The combined organic layer was washed with water and brine, dried over Na₂SO₄, and concentrated to give 9 (1.8 g) which was used for the next step. ESI-LCMS: m/z 557 [M+H]⁺.

[0641] Preparation of (10): To a solution of 9 (1.8 g) in pyridine (20 mL) and was added 2M NaOH (MeOH/H₂O=4/1) (5 mL) at 0° C. for 1 h. LCMS showed 9 was consumed. The mixture was added saturated NH₄Cl till pH=7.5. The mixture was diluted with water and EA. The organic layer was washed with brine and dried over Na₂SO₄ and concentrated to give the crude. This resulted in to give the product 10 (1.5 g) as a white solid which was used for the next step. ESI-LCMS: m/z 487 [M+H]⁺.

[0642] Preparation of (11): To a stirred solution of 10 (1.5 g) in pyridine (20 mL) were added DMTrCl (1.1 g, 3 mmol) at r.t. And the reaction mixture was stirred at r.t for 2.5 hr. With ice-bath cooling, the reaction was quenched with water and the product was extracted into EA. The organic layer was washed with brine and dried over Na₂SO₄ and concentrated to give the crude. The crude was purified by Flash-Prep-HPLC with the following conditions (IntelFlash-1): Column, C18 silica gel; mobile phase, CH₃CN/H₂O (0.5% NH₄HCO₃)=1/1 increasing to CH₃CN/H₂O (0.5% NH₄HCO₃)=1/0 within 25 min, the eluted product was collected at CH₃CN/H₂O (0.5% NH₄HCO₃)=7/3 Detector, UV 254 nm. This resulted in to give the product 11 (1.9 g, 2.4 mmol, 85.7% yield over two steps) as a white solid. ESI-LCMS: m/z 789.3 [M+H]⁺; ¹H-NMR (400 MHz, DMSO-d₆): δ 12.10 (m, 1H), 11.63 (m, 1H), 8.20 (m, 1H), 7.35-7.33 (m, 2H), 7.29-7.19 (m, 7H), 6.86-6.83 (m, 4H), 5.89-5.88 (d, J=4 Hz, 1H), 4.40-4.28 (m, 2H), 3.72 (m, 6H), 2.81-2.76 (m, 1H), 1.13-1.11 (m, 6H), 0.80 (m, 9H), 0.05-0.01 (m, 7H).

[0643] Preparation of (12): To a solution of 11 (1.9 g, 2.4 mmol) in THF (20 mL) was added 1 M TBAF solution (3 mL). The reaction mixture was stirred at r.t. for 1.5 h. LCMS showed 11 was consumed completely. Water (100 mL) was added. The product was extracted with EA (50 mL) and the organic layer was washed with brine and dried over Na₂SO₄. Then the organic layer was concentrated to give a residue which was purified by Flash-Prep-HPLC with the following conditions (IntelFlash-1): Column, C18 silica gel; mobile phase, CH₃CN/H₂O (0.5% NH₄HCO₃)=2/3 increasing to CH₃CN/H₂O (0.5% NH₄HCO₃)=1/0 within 20 min, the eluted product was collected at CH₃CN/H₂O (0.5% NH₄HCO₃)=58/42; Detector, UV 254 nm. This resulted in to give 12 (1.5 g, 2.2 mmol, 91.6% yield) as a white solid. ESI-LCMS: m/z 675.3 [M+H]⁺; ¹H-NMR (400 MHz, DMSO-d₆): δ 12.09 (m, 1H), 11.60 (m, 1H), 8.14 (m, 1H), 7.35-7.27 (m, 2H), 7.25-7.20 (m, 7H), 6.85-6.80 (m, 4H), 5.96-5.94 (d, J=8 Hz, 1H), 5.26-5.24 (m, 1H), 4.35-4.28 (m, 2H), 3.72 (m, 6H), 3.32 (m, 1H), 2.79-2.72 (m, 1H), 1.13-1.11 (m, 6H).

[0644] Preparation of Example 33 monomer: To a suspension of 11 (1.5 g, 2.2 mmol) in DCM (15 mL) was added DCI (220.8 mg, 1.9 mmol) and CEP[N(iPr)₂]₂ (795.7 mg, 2.6 mmol) under N₂ pro. The mixture was stirred at r.t. for 2 h. LCMS showed 11 was consumed completely. The solution was washed with water twice and washed with brine and dried over Na₂SO₄. Then concentrated to give a residue which was purified by Flash-Prep-HPLC with the following conditions (IntelFlash-1): Column, C18 silica gel; mobile phase, CH₃CN/H₂O (0.5% NH₄HCO₃)=1/1 increasing to CH₃CN/H₂O (0.5% NH₄HCO₃)=1/0 within 20 min, the eluted product was collected at CH₃CN/H₂O (0.5% NH₄HCO₃)=4/1; Detector, UV 254 nm. This resulted in to give Example 33 monomer (1.6 g, 1.8 mmol, 83% yield) as a white solid. ESI-LCMS: m/z 875 [M+H]⁺; ¹H-NMR (400 MHz, DMSO-d₆): δ 12.12 (m, 1H), 11.60 (m, 1H), 8.15 (m, 1H), 7.37-7.29 (m, 2H), 7.27-7.20 (m, 7H), 6.86-6.81 (m, 4H), 5.94-5.88 (m, 1H), 4.54-4.51 (m, 2H), 4.21-4.20 (m, 1H), 3.73-3.54 (m, 10H), 2.80-2.75 (m, 1H), 2.61-2.58 (m, 1H), 1.19-1.11 (m, 19H). ³¹P-NMR (162 MHz, DMSO-d₆): δ=149.77, 149.71.

### Example 34. Synthesis of Monomer

[chemical structure]

[chemical structure]

[0645] Preparation of (2): To a solution of 1 (50.0 g, 99.2 mmol) and 1a (11.3 g, 119.0 mmol) in ACN (500.0 mL). Then added BSA (53.2 g, 218.0 mmol) under N₂ Pro. The mixture was stirred at 50° C. for 1 h until the solution was clear. Then cool down to 0° C. and dropped TMSOTf (26.4 g, 119.0 mmol). The mixture was stirred at 75° C. for 1 h, TLC showed 1 was consumed completely. The reaction was quenched by sodium bicarbonate solution at 0° C., then the solution was diluted with EA, washed with H₂O twice. The solvent was concentrated under reduced pressure and the crude 2 (60.1 g) was used for next step. ESI-LCMS: m/z 540.2 [M+H]⁺.

[0646] Preparation of (3): To a solution of 2 (60.1 g) in CH₃NH₂/ethanol (500.0 mL). The mixture was stirred at 25° C. for 2 h. TLC showed 2 was consumed completely. The solvent was concentrated under reduced pressure and the residue was purified by c.c. (MeOH:DCM=50:1 ˜10:1) to give 3 (22.0 g, 96.9 mmol, 97.3% yield over two steps). ESI-LCMS: m/z 228.0 [M+H]⁺; ¹H-NMR (400 MHz, DMSO-d₆): δ 8.01-7.98 (m, 1H), 7.43-7.38 (m, 1H), 6.37-6.35 (m, 1H), 6.27-6.23 (m, 1H), 6.03 (d, J=3.5 Hz, 1H), 5.39 (d, J=4.2 Hz, 1H), 5.11 (t, J=5.1 Hz, 1H), 5.03 (d, J=5.1 Hz, 1H), 3.98-3.95 (m, 2H), 3.91-3.88 (m, 1H), 3.74-3.57 (m, 2H).

[0647] Preparation of (4): To a solution of 3 (22.0 g, 96.9 mmol) in pyridine (250.0 mL), TrtCl (30.7 g, 110.5 mmol) was added. The mixture was stirred at 25° C. for 24 h. TLC showed 3 was consumed completely, H₂O was added to the mixture. Then filtered and the filtrate diluted with EA, the organic layer was washed with NaHCO₃ and brine. The solvent was concentrated under reduced pressure and then purified by c.c. (PE/EA=5:1˜0:1) to give 4 (38.8 g, 82.5 mmol, 85.1% yield) as a white solid. ESI-LCMS: m/z 470.1 [M+H]⁺.

[0648] Preparation of (5): To a solution of 4 (38.8 g, 82.5 mmol) in DMF (500.0 mL), collidine (10.0 g, 107.3 mmol), TrtCl (27.6 g, 99.1 mmol) were added followed by AgNO₃ (18.0 g, 105.1 mmol). The mixture was stirred at 25° C. for 4 h. TLC showed 4 was consumed completely. Then filtered and the filtrate diluted with EA. The organic layer was washed with NaHCO₃ and brine. The solvent was concentrated under reduced pressure and then purified by c.c. (PE/EA=5:1 ˜1:1) to give a mixture of 5 (52.3 g, 73.5 mmol, 86.3% yield) as white solid. ESI-LCMS: m/z 711.1 [M+H]⁺.

[0649] Preparation of (6): To a solution of 5 (52.3 g, 73.5 mmol) in DCM (500.0 mL), DMAP (8.9 g, 73.5 mmol), TEA (14.9 g, 147.3 mmol, 20.6 mL) were added, cool down to 0° C., TfCl (16.1 g, 95.6 mmol) dissolved in DCM (100.0 mL) were dropped. The mixture was stirred at 25° C. for 1 h. TLC showed 5 was consumed completely. Then filtered and the solution diluted with EA. The organic layer was washed with NaHCO₃ and brine. The solvent was concentrated under reduced pressure to get crude 6 (60.2 g) as a brown solid. ESI-LCMS: m/z 844.2 [M+H]⁺.

[0650] Preparation of (7): To a solution of 6 (60.2 g) in DMF (500.0 mL), KOAc (36.1 g, 367.8 mmol) were added, The mixture was stirred at 25° C. for 14 h and 50° C. for 3 h, TLC showed 6 was consumed completely. Then filtered and the solution diluted with EA. The organic layer was washed with H₂O and brine. The solvent was concentrated under reduced pressure, residue was purified by c.c. (PE/EA=5:1 ˜1:1) to give 7 (28.0 g, 39.3 mmol, 53.5% yield) as yellow solid. ESI-LCMS: m/z 710.2 [M−H]⁻; ¹H-NMR (400 MHz, DMSO-d₆): δ 7.37-7.25 (m, 33H), 6.34-6.31 (m, 2H), 6.13-6.10 (m, 1H), 5.08 (d, J=4.2 Hz, 1H), 3.99 (d, J=7.6 Hz, 1H), 3.74 (s, 1H), 3.12 (t, J=9.2 Hz, 1H), 2.72-2.69 (m, 1H).

[0651] Preparation of (8): To a solution of 7 (28.0 g, 39.3 mmol) in DCM (300.0 mL), DAST (31.6 g, 196.6 mmol) was added at 0° C., the mixture was stirred at 25° C. for 16 h, TLC showed 7 was consumed completely. Then the solution was diluted with EA, washed with NaHCO₃ twice, the solvent was removed under reduced pressure, residue was purified by c.c. (PE/EA=5:1 ˜3:1) to give 8 (5.0 g, 7.0 mmol, 17.8% yield) as a white solid. ESI-LCMS: m/z 748.2 [M+2NH₄]⁺; ¹H-NMR (400 MHz, DMSO-d₆): δ 7.57-7.18 (m, 35H), 6.30 (d, J=8.8 Hz, 1H), 6.00 (d, J=19.5 Hz, 1H), 5.92-5.88 (m, 1H), 4.22-4.17 (m, 2H), 3.94 (s, 0.5H), 3.80 (s, 0.5H), 3.35-3.31 (m, 1H), 3.14-3.10 (m, 1H); ¹⁹F-NMR (376 MHz, DMSO-d₆): δ −193.54.

[0652] Preparation of (9): To a solution of 8 (5.0 g, 7.0 mmol) in DCM (60.0 mL) was added DCA (3.6 mL) and TES (15.0 mL). The mixture was stirred at 20° C. for 1 h, TLC showed 8 was consumed completely. Then the solution was concentrated under reduced pressure, the residue was purified by Flash-Prep-HPLC with the following conditions (IntelFlash-1): Column, C18 silica gel; mobile phase, CH₃CN/H₂O (0.5% NH₄HCO₃)=0/1 increasing to CH₃CN/H₂O (0.5% NH₄HCO₃)=1/3 within 25 min, the eluted product was collected at CH₃CN/H₂O (0.5% NH₄HCO₃)=0/1; Detector, UV 254 nm. This resulted in to give 9 (1.6 g, 6.9 mmol, 98.5% yield) as a white solid. ESI-LCMS: m/z 229.9 [M+H]⁺; ¹H-NMR (400 MHz, DMSO-d₆): δ 8.06-8.04 (m, 1H), 7.48-7.43 (m, 1H), 6.39 (d, J=9.0 Hz, 1H), 6.31-6.27 (m, 1H), 6.16-6.11 (m, 1H), 5.63 (s, 1H), 5.26 (s, 1H), 4.95-4.81 (m, 1H), 4.20-411 (m, 1H), 3.95 (d, J=8.2 Hz, 1H), 3.84 (d, J=12.4 Hz, 1H), 3.64 (d, J=12.1 Hz, 1H); ¹⁹F-NMR (376 MHz, DMSO-d₆): δ −201.00.

[0653] Preparation of (10): To a solution of 9 (1.6 g, 6.9 mmol) in pyridine (20.0 mL) was added DMTrCl (3.5 g, 10.5 mmol) at 20° C. and stirred for 1 h. TLC showed 9 was consumed completely. Water was added and extracted with EA, the organic layer was washed with NaHCO₃ and brine. Then the solution was concentrated under reduced pressure and the residue was purified by Flash-Prep-HPLC with the following conditions (IntelFlash-1): Column, C18 silica gel; mobile phase, CH₃CN/H₂O (0.5% NH₄HCO₃)=1/3 increasing to CH₃CN/H₂O (0.5% NH₄HCO₃)=4/1 within 25 min, the eluted product was collected at CH₃CN/H₂O (0.5% NH₄HCO₃)=1/1; Detector, UV 254 nm. This resulted in to give 10 (2.2 g, 4.2 mmol, 60.8% yield) as a white solid. ESI-LCMS: m/z 530.1 [M−H]⁻; ¹H-NMR (400 MHz, DMSO-d₆): δ 7.93-7.91 (m, 1H), 7.47-7.23 (m, 10H), 6.91-6.89 (m, 4H), 6.41 (d, J=8.8 Hz, 1H), 6.13 (d, J=18.8 Hz, 1H), 6.00-5.96 (m, 1H), 5.68 (d, J=6.6 Hz, 1H), 5.01 (d, J=4.2 Hz, 0.5H), 4.88 (d, J=4.2 Hz, 0.5H), 4.42-4.31 (m, 1H), 4.10-4.08 (m, 1H), 3.74 (s, 6H), 3.40-3.34 (m, 2H); ¹⁹F-NMR (376 MHz, DMSO-d₆): δ −199.49.

[0654] Preparation of Example 34 monomer: To a solution of 10 (2.2 g, 4.2 mmol) in DCM (20.0 mL) was added DCI (415 mg, 3.5 mmol) and CEP (1.5 g, 4.9 mmol) under N₂ pro. The mixture was stirred at 20° C. for 0.5 h. TLC showed 10 was consumed completely. The product was extracted with DCM, the organic layer was washed with H₂O and brine. Then the solution was concentrated under reduced pressure and the residue was purified by cc (PE/EA=5:1 ˜ 1:1) and Flash-Prep-HPLC with the following conditions (IntelFlash-1): Column, C18 silica gel; mobile phase, CH₃CN/H₂O (0.5% NH₄HCO₃)=1/3 increasing to CH₃CN/H₂O (0.5% NH₄HCO₃)=1/0 within 25 min, the eluted product was collected at CH₃CN/H₂O (0.5% NH₄HCO₃)=1/0; Detector, UV 254 nm. This resulted in to give Example 34 monomer (2.1 g, 3.0 mmol, 73.1% yield) as a white solid. ESI-ESI-LCMS: m/z 732.2 [M+H]⁺; ¹H-NMR (400 MHz, DMSO-d₆): δ 7.98-7.92 (m, 1H), 7.42-7.24 (m, 10H), 6.91-6.85 (m, 4H), 6.43-6.39 (m, 1H), 6.18-6.11 (m, 1H), 6.01-5.97 (m, 1H), 5.22-5.19 (m, 0.5H), 5.09-5.06 (m, 0.5H), 4.73-4.52 (m, 1H), 4.21-4.19 (m, 1H), 3.79-3.62 (m, 7H), 3.57-3.47 (m, 4H), 3.32-3.28 (m, 1H), 2.75-2.58 (m, 1H), 1.13-0.92 (m, 12H); ¹⁹F-NMR (376 MHz, DMSO-d₆): δ −196.82, −196.84, −197.86-197.88; ³¹P-NMR (162 MHz, DMSO-d₆): δ 149.88, 149.83, 149.39, 149.35.

### Example 35. Synthesis of Monomer

[chemical structure]

[0655] Preparation of (2): To the solution of Bromobenzene (2.1 g, 13.6 mmol) in dry THF (15 mL) was added 1.6 M n-BuLi (7 mL, 11.8 mmol) drop wise at −78° C. The mixture was stirred at −78° C. for 0.5 h. Then the 1 (3.0 g, 9.1 mmol, Wang, Guangyi et al, Journal of Medicinal Chemistry, 2016, 59 (10), 4611-4624) was dissolved in THF (15 mL) and added to the mixture drop wise with keeping at −78° C. Then the reaction mixture was stirred at −78° C. for 1 hr. LC-MS showed 1 was consumed completely. Then the solution was added to saturated aq. NH₄Cl and the resulting mixture was extracted with EA. The combined organic layer was washed with water and brine, dried over Na₂SO₄, and concentrated under reduced pressure to give a residue which was purified by Flash-Prep-HPLC with the following conditions (IntelFlash-1): Column, C18 silica gel; mobile phase, CH₃CN/H₂O (0.5% NH₄HCO₃)=2/3 increasing to CH₃CN/H₂O (0.5% NH₄HCO₃)=4/1 within 25 min, the eluted product was collected at CH₃CN/H₂O (0.5% NH₄HCO₃)=3/2; Detector, UV 254 nm. This resulted in to give 2 (3.0 g, 7.3 mmol, 80.0%) as a white solid. ESI-LCMS: m/z 391 [M−OH]⁻.

[0656] Preparation of (3): To the solution of 2 (4.0 g, 9.8 mmol) in DCM (40 mL) was added TES (1.9 g, 11.7 mmol) at −78° C., and the mixture was added BF₃·OEt₂ (2.1 g, 14.7 mmol) drop wise at −78° C. The mixture was stirred at −40° C. for 1 hr. LC-MS showed 2 was consumed completely. Then the solution was added to saturated aq. NaHCO₃ and the resulting mixture was extracted with DCM. The combined organic layer was washed with water and brine, dried over Na₂SO₄, and concentrated under reduced pressure to give a residue which was purified by Flash-Prep-HPLC with the following conditions (IntelFlash-1): Column, C18 silica gel; mobile phase, CH₃CN/H₂O (0.5% NH₄HCO₃)=2/3 increasing to CH₃CN/H₂O (0.5% NH₄HCO₃)=4/1 within 25 min, the eluted product was collected at CH₃CN/H₂O (0.5% NH₄HCO₃)=7/3; Detector, UV 254 nm. This resulted in to give 3 (3.1 g, 5.3 mmol, 54.0%) as a water clear oil. ESI-LCMS: m/z 410 [M+H₂O]⁺; ¹H-NMR (400 MHz, CDCl₃: δ 7.48-7.25 (m, 15H), 5.24-5.13 (m, 1H), 4.93-4.74 (m, 1H), 4.74-4.46 (m, 4H), 4.37-4.25 (m, 1H), 4.19-4.05 (m, 1H), 4.00-3.80 (m, 1H), 3.77-3.63 (m, 1H). ¹⁹F-NMR (376 MHz, CDCl₃): δ −196.84.

[0657] Preparation of (4): To the solution of 3 (2.1 g, 5.3 mmol) in dry DCM (20 mL) was added 1 M BCl₃ (25 mL, 25.5 mmol) drop wise at −78° C., and the reaction mixture was stirred at −78° C. for 0.5 hr. LC-MS showed 3 was consumed completely. After completion of reaction, the resulting mixture was poured into water (50 mL). The solution was extracted with DCM and the combined organic layer was concentrated under reduced pressure to give a crude. The crude in MeOH (4 mL) was added 1 M NaOH (15 mL), and the mixture was stirred at r.t for 5˜10 min. The mixture was extracted with EA. The combined organic layer was washed with brine, dried over Na₂SO₄, and concentrated under reduced pressure to give a residue which was purified by silica gel column chromatography (eluent, DCM:MeOH=40:1˜15:1) to give 4 (1.0 g, 4.7 mmol, 88.6%) as a water clear oil. ESI-LCMS: m/z 211 [M−H]⁻; ¹H-NMR (400 MHz, DMSO-d₆): δ 7.58-7.19 (m, 5H), 5.41 (d, J=6.1 Hz, 1H), 5.09-5.95 (m, 1H), 5.95-4.84 (m, 1H), 4.82-4.59 (m, 1H), 4.14-3.94 (m, 1H), 3.89-3.80 (m, 1H), 3.78-3.67 (m, 1H), 3.65-3.53 (m, 1H). ¹⁹F-NMR (376 MHz, DMSO-d₆): δ −196.46.

[0658] Preparation of (5): To a solution of 4 (1.0 g, 4.7 mmol) in Pyridine (10 mL) was added DMTrCl (2.0 g, 5.7 mmol). The reaction mixture was stirred at r.t. for 2 hr. LCMS showed 4 was consumed and water (100 mL) was added. The product was extracted with EA (100 mL) and the organic layer was washed with brine and dried over Na₂SO₄ and concentrated to give the crude. The crude was further purified by Flash-Prep-HPLC with the following conditions (IntelFlash-1): Column, C18 silica gel; mobile phase, CH₃CN/H₂O (0.5% NH₄HCO₃)=1/1 increasing to CH₃CN/H₂O (0.5% NH₄HCO₃)=1/0 within 20 min, the eluted product was collected at CH₃CN/H₂O (0.5% NH₄HCO₃)=9/1; Detector, UV 254 nm. This resulted in to give 5 (2.1 g, 4.1 mmol, 87.0%) as a red oil. ESI-LCMS: m/z 513 [M−H]⁻; ¹H-NMR (400 MHz, DMSO-d₆): δ 7.56-7.16 (m, 14H), 6.94-9.80 (m, 4H), 5.45 (d, J=6.3 Hz, 1H), 5.21-5.09 (m, 1H), 4.89-4.68 (m, 1H), 4.18-4.03 (m, 2H), 3.74 (s, 6H), 3.33-3.29 (m, 1H), 3.26-3.17 (m, 1H). ¹⁹F-NMR (376 MHz, DMSO-d₆): δ −194.08.

[0659] Preparation of Example 35 monomer: To a suspension of 5 (2.1 g, 4.1 mmol) in DCM (20 mL) was added DCI (410 mg, 3.4 mmol) and CEP[N(iPr)₂]₂ (1.5 g, 4.9 mmol). The mixture was stirred at r.t. for 1 h. LC-MS showed 5 was consumed completely. The solution was washed with water twice and washed with brine and dried over Na₂SO₄. Then concentrated to give the crude. The crude was purification by Flash-Prep-HPLC with the following conditions (IntelFlash-1): Column, C18 silica gel; mobile phase, CH₃CN/H₂O (0.5% NH₄HCO₃)=1/1 increasing to CH₃CN/H₂O (0.5% NH₄HCO₃)=1/0 within 20 min, the eluted product was collected at CH₃CN/H₂O (0.5% NH₄HCO₃)=1/0; Detector, UV 254 nm. This resulted in to give Example 35 monomer (2.1 g, 2.9 mmol, 70.0%) as a white solid. ESI-LCMS: m/z 715 [M+H]⁺; ¹H-NMR (400 MHz, DMSO-d₆): δ 7.59-7.16 (m, 14H), 6.94-9.80 (m, 4H), 5.26-5.12 (m, 1H), 5.06-4.77 (m, 1H), 4.50-4.20 (m, 1H), 4.20-4.10 (m, 1H), 3.83-3.63 (m, 7H), 3.59-3.37 (m, 4H), 3.25-3.13 (m, 1H), 2.80-2.66 (m, 1H), 2.63-2.53 (m, 1H), 1.18-0.78 (m, 12H). ¹⁹F-NMR (376 MHz, DMSO-d₆): δ −194.40, −194.42, −194.50, −194.53. ³¹P-NMR (162 MHz, DMSO-d₆): δ 149.38, 149.30, 149.02, 148.98.

### Example 36: Synthesis of 5′ End Cap Monomer

[chemical structure]

[0660] Preparation of (2): 1 (15 g, 58.09 mmol) and tert-butyl N-methylsulfonylcarbamate (17.01 g, 87.13 mmol) were dissolved in THF (250 mL), and PPh₃ (30.47 g, 116.18 mmol) was added followed by dropwise addition of DIAD (23.49 g, 116.18 mmol, 22.59 mL) at 0° C. The reaction mixture was stirred at 15° C. for 12 h. Upon completion as monitored by TLC (DCM/MeOH=10/1), the reaction mixture was evaporated to give a residue. The residue was purified by flash silica gel chromatography (ISCO®; 120 g SepaFlash® Silica Flash Column, Eluent of 0˜20% MeOH/DCM gradient @ 60 mL/min) to give 2 (6.9 g, 24.28% yield) as a white solid. ESI-LCMS: m/z 457.9 [M+Na]⁺; ¹H NMR (400 MHz, CDCl₃) δ=8.64 (br s, 1H), 7.64 (d, J=8.2 Hz, 1H), 5.88 (d, J=1.9 Hz, 1H), 5.80 (dd, J=2.2, 8.2 Hz, 1H), 4.19-4.01 (m, 3H), 3.90 (dt, J=5.5, 8.2 Hz, 1H), 3.82-3.78 (m, 1H), 3.64 (s, 3H), 3.32 (s, 3H), 2.75 (d, J=8.9 Hz, 1H), 1.56 (s, 9H).

[0661] Preparation of (3): 2 (6.9 g, 15.85 mmol) was dissolved in MeOH (40 mL), and a solution of HCl/MeOH (4 M, 7.92 mL) was added dropwise. The reaction mixture was stirred at 15° C. for 12 h, and then evaporated to give a residue. The residue was purified by flash silica gel chromatography (ISCO®; 40 g SepaFlash® Silica Flash Column, Eluent of 0˜10% MeOH/DCM gradient @ 40 mL/min) to give 3 (2.7 g, 50.30% yield) as a white solid. ESI-LCMS: m/z 336.0 [M+H]⁺; ¹H NMR (400 MHz, CD₃CN) δ=9.20 (br s, 1H), 7.52 (d, J=8.1 Hz, 1H), 5.75 (d, J=3.8 Hz, 1H), 5.64 (dd, J=2.0, 8.1 Hz, 1H), 5.60-5.52 (m, 1H), 4.15-3.99 (m, 1H), 3.96-3.81 (m, 2H), 3.46 (s, 3H), 3.44-3.35 (m, 1H), 3.34-3.26 (m, 1H), 2.92 (s, 3H).

[0662] Preparation of (Example 36 monomer): To a solution of 3 (2.14 g, 6.38 mmol) in DCM (20 mL) was added dropwise 3-bis(diisopropylamino)phosphanyloxypropanenitrile (2.50 g, 8.30 mmol, 2.63 mL) at 0° C., followed by 1H-imidazole-4, 5-dicarbonitrile (829 mg, 7.02 mmol), and the mixture was purged under Ar for 3 times. The reaction mixture was stirred at 15° C. for 2 h. Upon completion, the mixture was quenched with 5% NaHCO₃ (20 mL), extracted with DCM (20 mL*2), washed with brine (15 mL), dried over Na₂SO₄, filtered, and evaporated to give a residue. The residue was purified by flash silica gel chromatography (ISCO®; 40 g SepaFlash® Silica Flash Column, Eluent of 0˜10% (Phase B: i-PrOH/DCM=1/2)/Phase A: DCM with 5% TEA gradient @ 40 mL/min) to give Example 36 monomer (1.73 g, 48.59% yield) as a white solid. ESI-LCMS: m/z 536.3 [M+H]⁺; ¹H NMR (400 MHz, CD₃CN) δ=7.58-7.48 (m, 1H), 5.83-5.78 (m, 1H), 5.71-5.64 (m, 1H), 4.40-4.29 (m, 1H), 4.19-4.07 (m, 1H), 3.98 (td, J=5.3, 13.3 Hz, 1H), 3.90-3.78 (m, 2H), 3.73-3.59 (m, 3H), 3.41 (d, J=14.8 Hz, 4H), 2.92 (br d, J=7.0 Hz, 3H), 2.73-2.63 (m, 2H), 1.23-1.11 (m, 12H); ³¹P NMR (162 MHz, CD₃CN) δ=149.81, 150.37.

### Example 37: Synthesis of 5′ End Cap Monomer

[chemical structure]

[0663] Preparation of (2): To a solution of 1 (10 g, 27.16 mmol) in DMF (23 mL) were added imidazole (3.70 g, 54.33 mmol) and TBSCl (8.19 g, 54.33 mmol) at 25° C. The mixture was stirred at 25° C. for 2 hr. Upon completion, the reaction mixture was diluted with H₂O (20 mL) and extracted with EA (30 mL*2). The combined organic layers were washed with brine (20 mL*2), dried over Na₂SO₄, filtered and concentrated under reduced pressure to give 2 (13 g, 99.2% yield) as a white solid. ESI-LCMS: m/z 482.9 [M+H]⁺.

[0664] Preparation of (3): To a solution of 2 (35.00 g, 72.56 mmol) in DMF (200 mL) was added NaN₃ (14.15 g, 217.67 mmol). The mixture was stirred at 60° C. for 17 h. Upon completion, the reaction mixture was diluted with H₂O (200 mL) and extracted with EA (200 mL*2). The combined organic layers were washed with brine (100 mL*2), dried over Na₂SO₄, filtered and concentrated under reduced pressure to give 3 (31.8 g, crude) as a yellow solid. ESI-LCMS: m/z 398.1 [M+H]⁺; ¹H NMR (400 MHz, DMSO-d₆) δ=11.21 (d, J=1.3 Hz, 1H), 7.50 (d, J=8.1 Hz, 1H), 5.57 (d, J=4.5 Hz, 1H), 5.46 (dd, J=2.1, 8.0 Hz, 1H), 4.06 (t, J=5.2 Hz, 1H), 3.81-3.64 (m, 2H), 3.44-3.30 (m, 2H), 2.31-2.25 (m, 3H), 0.65 (s, 9H), −0.13 (s, 6H).

[0665] Preparation of (4): To a solution of 3 (7 g, 17.61 mmol) in THF (60 mL) was added Pd/C (2 g) at 25° C. The reaction mixture was stirred at 25° C. for 3 h under H₂ atmosphere (15 PSI). The reaction mixture was filtered, and the filtrate was concentrated to give 4 (5.4 g, 75.11% yield) as a gray solid. ESI-LCMS: m/z 372.1 [M+H]⁺; ¹H NMR (400 MHz, DMSO-d₆) δ=7.93 (d, J=8.0 Hz, 1H), 5.81 (d, J=5.5 Hz, 1H), 5.65 (d, J=8.3 Hz, 1H), 4.28 (t, J=4.6 Hz, 1H), 3.88 (t, J=5.3 Hz, 1H), 3.74 (q, J=4.6 Hz, 1H), 3.31 (s, 3H), 2.83-2.66 (m, 2H), 0.88 (s, 9H), 0.09 (s, 6H).

[0666] Preparation of (5): To a solution of 4 (3 g, 8.08 mmol) in DCM (30 mL) was added TEA (2.45 g, 24.23 mmol, 3.37 mL) followed by dropwise addition of 3-chloropropane-1-sulfonyl chloride (1.50 g, 8.48 mmol, 1.03 mL) at 25° C. The reaction mixture was stirred at 25° C. for 18 h under N₂ atmosphere. Upon completion, the reaction mixture was diluted with H₂O (50 mL) and extracted with DCM (50 mL*2). The combined organic layers were washed with brine (50 mL*2), dried over Na₂SO₄, filtered and concentrated under reduced pressure. The residue was purified by flash silica gel chromatography (ISCO®; 24 g SepaFlash® Silica Flash Column, Eluent of 0˜30% MeOH/DCM @ 50 mL/min) to give 5 (3.6 g, 84.44% yield) as a white solid. ESI-LCMS: m/z 512.1 [M+H]⁺; ¹H NMR (400 MHz, DMSO-d₆) δ=11.42 (s, 1H), 7.75 (d, J=8.1 Hz, 1H), 7.49 (t, J=6.2 Hz, 1H), 5.83 (d, J=5.8 Hz, 1H), 5.70-5.61 (m, 1H), 4.33-4.23 (m, 1H), 3.95 (t, J=5.5 Hz, 1H), 3.90-3.78 (m, 1H), 3.73 (t, J=6.5 Hz, 2H), 3.30 (s, 3H), 3.26-3.12 (m, 4H), 2.14-2.02 (m, 2H), 0.88 (s, 9H), 0.11 (d, J=3.3 Hz, 6H).

[0667] Preparation of (6): To a solution of 5 (5 g, 9.76 mmol) in DMF (45 mL) was added DBU (7.43 g, 48.82 mmol, 7.36 mL). The mixture was stirred at 25° C. for 16 h. The reaction mixture was concentrated to give a residue, diluted with H₂O (50 mL) and extracted with EA (50 mL*2). The combined organic layers were washed with brine (50 mL*2), dried over Na₂SO₄, filtered and concentrated under reduced pressure. The residue was purified by flash silica gel chromatography (ISCO®; 24 g SepaFlash® Silica Flash Column, Eluent of 0˜80% EA/PE @ 40 mL/min) to give 6 (4.4 g, 89.06% yield) as a white solid. ESI-LCMS: m/z 476.1 [M+H]⁺; ¹H NMR (400 MHz, DMSO-d₆) δ=11.43 (d, J=1.7 Hz, 1H), 7.72 (d, J=8.1 Hz, 1H), 5.82 (d, J=4.8 Hz, 1H), 5.67 (dd, J=2.1, 8.1 Hz, 1H), 4.22 (t, J=5.1 Hz, 1H), 3.99-3.87 (m, 2H), 3.33-3.27 (m, 6H), 3.09 (dd, J=6.6, 14.7 Hz, 1H), 2.26-2.16 (m, 2H), 0.88 (s, 9H), 0.10 (d, J=3.8 Hz, 6H).

[0668] Preparation of (7): To a solution of 6 (200 mg, 420.49 umol) in MeOH (2 mL) was added NH₄F (311.48 mg, 8.41 mmol, 20 eq), and the mixture was stirred at 80° C. for 2 h. The mixture was filtered and concentrated to give a residue, which was purified by flash silica gel chromatography (ISCO®; 4 g SepaFlash® Silica Flash Column, Eluent of 0˜50% MeOH/DCM @ 20 mL/min) to give 7 (120 mg, 76.60% yield) as a white solid. ESI-LCMS: m/z 362.1 [M+H]⁺; ¹H NMR (400 MHz, DMSO-d₆) δ=11.37 (br s, 1H), 7.68 (d, J=8.1 Hz, 1H), 5.81 (d, J=4.6 Hz, 1H), 5.65 (d, J=8.0 Hz, 1H), 4.02 (q, J=5.6 Hz, 1H), 3.95-3.83 (m, 2H), 3.34 (s, 9H), 3.09 (dd, J=6.9, 14.6 Hz, 1H), 2.26-2.14 (m, 2H).

[0669] Preparation of (Example 37 monomer): To a solution of 7 (1.5 g, 4.15 mmol) in CH₃CN (12 mL) were added 3-bis(diisopropylamino)phosphanyloxypropanenitrile (1.63 g, 5.40 mmol, 1.71 mL) and 1H-imidazole-4,5-dicarbonitrile (539.22 mg, 4.57 mmol) in one portion at 0° C. The reaction mixture was gradually warmed to 25° C. The reaction mixture was stirred at 25° C. for 2 h under N₂ atmosphere. Upon completion, the reaction mixture was diluted with NaHCO₃ (20 mL) and extracted with DCM (20 mL*2). The combined organic layers were washed with brine (20 mL*2), dried over Na₂SO₄, filtered and concentrated under reduced pressure to give a residue, which was purified by flash silica gel chromatography (ISCO®; 12 g SepaFlash® Silica Flash Column, Eluent of 0˜85% EA/PE with 0.5% TEA @ 30 mL/min to give Example 37 monomer (800 mg, 33.6% yield) as a white solid. ESI-LCMS: m/z 562.3 [M+H]⁺; ¹H NMR (400 MHz, CD₃CN) δ=9.28 (br s, 1H), 7.55 (br dd, J=8.3, 12.8 Hz, 1H), 5.86 (br d, J=3.9 Hz, 1H), 5.65 (br d, J=8.0 Hz, 1H), 4.33-4.06 (m, 2H), 4.00-3.89 (m, 1H), 4.08-3.86 (m, 1H), 3.89-3.72 (m, 4H), 3.43 (br d, J=15.1 Hz, 6H), 3.23-3.05 (m, 3H), 2.69 (br s, 2H), 2.36-2.24 (m, 2H), 1.26-1.10 (m, 12H): ³¹P NMR (162 MHz, CD₃CN) δ=149.94, 149.88.

### Example 38: Synthesis of 5′ End Cap Monomer

[chemical structure]

[0670] Preparation of (2): To a solution of 1 (30 g, 101.07 mmol, 87% purity) in CH₃CN (1.2 L) and Py (60 mL) were added I₂ (33.35 g, 131.40 mmol, 26.47 mL) and PPh₃ (37.11 g, 141.50 mmol) in one portion at 10° C. The reaction was stirred at 25° C. for another 48 h. The mixture was diluted with aq. Na₂S203 (300 mL) and aq·NaHCO₃ (300 mL), concentrated to remove CH₃CN, and then extracted with EtOAc (300 mL*3). The combined organic layers were washed with brine (300 mL), dried over Na₂SO₄, filtered and concentrated under reduced pressure to give a residue. The residue was purified by flash silica gel chromatography (ISCO®; 330 g SepaFlash® Silica Flash Column, Eluent of 0-60% Methanol/Dichloromethane gradient @ 100 mL/min) to give 2 (28.2 g, 72.00% yield, 95% purity) as a brown solid. ESI-LCMS: m/z 369.1 [M+H]⁺; ¹H NMR (400 MHz, DMSO-d₆) δ=11.43 (s, 1H), 7.68 (d, J=8.1 Hz, 1H), 5.86 (d, J=5.5 Hz, 1H), 5.69 (d, J=8.1 Hz, 1H), 5.46 (d, J=6.0 Hz, 1H), 4.08-3.96 (m, 2H), 3.90-3.81 (m, 1H), 3.60-3.51 (m, 1H), 3.40 (dd, J=6.9, 10.6 Hz, 1H), 3.34 (s, 3H).

[0671] Preparation of (3): To a solution of 2 in DMF (90 mL) were added imidazole (4.25 g, 62.48 mmol) and TBSCl (6.96 g, 46.18 mmol) in one portion at 15° C. The mixture was stirred at 15° C. for 6 h. The reaction mixture was quenched by addition of H₂O (300 mL) and extracted with EtOAc (300 mL*2). The combined organic layers were washed with brine (300 mL), dried over Na₂SO₄, filtered and concentrated under reduced pressure to give 3 (13.10 g, crude) as a white solid. ESI-LCMS: m/z 483.0 [M+H]⁺.

[0672] Preparation of (4): To a solution of 3 (10 g, 20.73 mmol) in MeOH (20 mL), H₂O (80 mL), and dioxane (20 mL) was added Na₂SO₃ (15.68 g, 124.38 mmol), and the mixture was stirred at 80° C. for 24 h. The reaction mixture was concentrated under reduced pressure to remove MeOH. The aqueous layer was extracted with EtOAc (80 mL*2) and concentrated under reduced pressure to give a residue. The residue was triturated with MeOH (100*3 mL) to give 4 (9.5 g, 94.48% yield, 90% purity) as a white solid. ESI-LCMS: m/z 437.0 [M+H]⁺.

[0673] Preparation of (5): To a solution of 4 (11 g, 21.42 mmol, 85% purity) in DCM (120 mL) was added DMF (469.65 mg, 6.43 mmol, 494.37 uL) at 0° C., followed by dropwise addition of oxalyl dichloride (13.59 g, 107.10 mmol, 9.37 mL). The mixture was stirred at 20° C. for 2 h. The reaction mixture was quenched by addition of water (60 mL) and the organic layer 5 (0.1125 M, 240 mL DCM) was used directly for next step. (This reaction was set up for two batches and combined) ESI-LCMS: m/z 455.0 [M+H]⁺.

[0674] Preparation of (6): 5 (186.4 mL, 0.1125 M in DCM) was diluted with DCM (60 mL) and treated with methylamine (3.26 g, 41.93 mmol, 40% purity). The mixture was stirred at 20° C. for 2 h. The reaction mixture was concentrated under reduced pressure to give a residue. The residue was purified by flash silica gel chromatography (ISCO®; 40 g SepaFlash® Silica Flash Column, Eluent of 0˜10%, MeOH/DCM gradient @ 40 mL/min) to give AGS-9-3-008 (1.82 g, 18.53% yield, 96% purity) as a yellow solid. ESI-LCMS: m/z 472.0 [M+Na]⁺; ¹H NMR (400 MHz, CDCl₃) δ=9.08 (s, 1H), 7.31 (d, J=8.1 Hz, 1H), 5.78 (d, J=8.1 Hz, 1H), 5.57 (d, J=3.8 Hz, 1H), 4.61-4.48 (m, 1H), 4.41-4.27 (m, 2H), 4.13-4.03 (m, 1H), 3.46 (s, 3H), 3.43-3.33 (m, 2H), 2.78 (d, J=5.2 Hz, 3H), 0.92 (s, 9H), 0.13 (s, 6H).

[0675] Preparation of (7): To a solution of 6 (2.3 g, 5.12 mmol) in MeOH (12 mL) was added HCl/MeOH (4 M, 6.39 mL). The mixture was stirred at 20° C. for 2 h. The reaction mixture was concentrated under reduced pressure to give a residue. The residue was purified by flash silica gel chromatography (ISCO®; 24 g SepaFlash® Silica Flash Column, Eluent of 0˜15%, MeOH/DCM gradient @ 30 mL/min) to give 7 (1.4 g, 79.98% yield) as a pink solid. ESI-LCMS: m/z 336.1 [M+H]⁺; ¹H NMR (400 MHz, CDCl₃) δ=9.12 (s, 1H), 7.39 (d, J=8.0 Hz, 1H), 5.79 (d, J=3.3 Hz, 1H), 5.66 (dd, J=2.1, 8.2 Hz, 1H), 5.13 (s, 1H), 4.13 (t, J=4.0, 7.4 Hz, 1H), 4.07-4.02 (m, 1H), 3.87 (dd, J=3.3, 5.5 Hz, 1H), 3.47 (s, 3H), 3.43-3.37 (m, 2H), 2.65 (d, J=4.5 Hz, 3H).

[0676] Preparation of (Example 38 monomer): To a mixture of 7 (1.7 g, 5.07 mmol) and 4A MS (1.4 g) in MeCN (18 mL) was added 3-bis(diisopropylamino)phosphanyloxypropanenitrile (1.99 g, 6.59 mmol, 2.09 mL) at 0° C., followed by addition of 1H-imidazole-4,5-dicarbonitrile (658.57 mg, 5.58 mmol) in one portion at 0° C. The mixture was stirred at 20° C. for 2 h. Upon completion, the reaction mixture was quenched by addition of sat. NaHCO₃ solution (20 mL) and diluted with DCM (40 mL). The organic layer was washed with sat. NaHCO₃ (20 mL*2), dried over Na₂SO₄, filtered and concentrated under reduced pressure to give a residue. The residue was purified by a flash silica gel column (0% to 5% i-PrOH in DCM with 5% TEA) to give Example 38 monomer (1.30 g, 46.68% yield) as a white solid. ESI-LCMS: m/z 536.2 [M+H]⁺; ¹H NMR (400 MHz, CD₃CN) 8=9.00 (s, 1H), 7.40 (d, J=8.0 Hz, 1H), 5.85-5.76 (m, 1H), 5.64 (d, J=8.0 Hz, 1H), 5.08 (d, J=5.0 Hz, 1H), 4.42-4.21 (m, 2H), 4.00 (td, J=4.6, 9.3 Hz, 1H), 3.89-3.61 (m, 4H), 3.47-3.40 (m, 4H), 3.37-3.22 (m, 1H), 2.71-2.60 (m, 5H), 1.21-1.16 (m, 11H), 1.21-1.16 (m, 1H); ³¹P NMR (162 MHz, CD₃CN) δ=150.07, 149.97

### Example 39: Synthesis of 5′ End Cap Monomer

[chemical structure]

[0677] Preparation of (2): To a solution of 1 (13.10 g, 27.16 mmol) in THF (100 mL) was added DBU (20.67 g, 135.78 mmol, 20.47 mL). The mixture was stirred at 60° C. for 6 h. Upon completion, the reaction mixture was quenched by addition of sat. NH₄Cl solution (600 mL) and extracted with EA (600 mL*2). The combined organic layers were washed with brine (100 ml), dried over Na₂SO₄, filtered and concentrated under reduced pressure to give a residue. The residue was purified by flash silica gel chromatography (ISCO®; 120 g SepaFlash® Silica Flash Column, Eluent of 0˜50% (Phase B: ethyl acetate:dichloromethane=1:1)/Phase A: petroleum ethergradient@ 45 mL/min) to give 2 (5.9 g, 60.1% yield) as a white solid. ESI-LCMS: m/z 355.1 [M+H]⁺; ¹H NMR (400 MHz, DMSO-d₆) δ=11.61-11.30 (m, 1H), 7.76-7.51 (m, 1H), 6.04 (d, J=5.4 Hz, 1H), 5.75 (s, 1H), 5.73-5.67 (m, 1H), 4.78 (d, J=4.9 Hz, 1H), 4.41 (d, J=1.1 Hz, 1H), 4.30 (t, J=4.8 Hz, 1H), 4.22 (d, J=1.4 Hz, 1H), 4.13 (t, J=5.1 Hz, 1H), 4.06-3.97 (m, 1H), 3.94-3.89 (m, 1H), 3.82-3.75 (m, 1H), 3.33 (s, 3H), 3.30 (s, 2H), 1.17 (t, J=7.2 Hz, 1H), 0.89 (s, 9H), 0.16-0.09 (m, 6H).

[0678] Preparation of (3): To a solution of 2 (4 g, 11.28 mmol) in DCM (40 mL) was added Ru(II)-Pheox (214.12 mg, 338.53 umol) in one portion followed by addition of diazo (dimethoxyphosphoryl)methane (2.54 g, 16.93 mmol) dropwise at 0° C. under N₂. The reaction was stirred at 20° C. for 16 h. Upon completion, the reaction mixture was filtered and concentrated under reduced pressure to give a residue. The residue was purified by flash silica gel chromatography (ISCO®; 80 g SepaFlash® Silica Flash Column, Eluent of 0˜4% MeOH/DCM@ 60 mL/min) to give 3 (5 g, 86.47% yield) as a red liquid. ESI-LCMS: m/z 477.1 [M+H]⁺; ¹H NMR (400 MHz, DMSO-d₆) δ=11.46 (s, 1H), 7.49 (d, J=8.0 Hz, 1H), 6.01-5.87 (m, 1H), 5.75 (dd, J=2.0, 8.0 Hz, 1H), 4.58 (d, J=3.8 Hz, 1H), 4.23 (dd, J=3.8, 7.8 Hz, 1H), 3.80-3.68 (m, 6H), 3.30 (s, 3H), 1.65-1.46 (m, 2H), 1.28-1.16 (m, 1H), 0.91 (s, 9H), 0.10 (d, J=4.3 Hz, 6H); ³¹P NMR (162 MHz, DMSO-d₆) δ=27.5

[0679] Preparation of (4): To a mixture of 3 (2.8 g, 5.88 mmol) and NaI (1.76 g, 11.75 mmol) in CH₃CN (30 mL) was added chloromethyl 2,2-dimethylpropanoate (2.21 g, 14.69 mmol, 2.13 mL) at 25° C. The mixture was stirred at 80° C. for 40 h under Ar. The reaction mixture was filtered and concentrated under reduced pressure to give a residue. The residue was purified by flash silica gel chromatography (ISCO®; 40 g SepaFlash® Silica Flash Column, Eluent of 0˜50% Ethylacetate/Petroleum ether gradient @ 40 mL/min) to give 4 (2.1 g, 51.23% yield, 97% purity) as a yellow solid. ESI-LCMS: 677.3 [M+H]⁺.

[0680] Preparation of (5): A mixture of 4 (2.09 g, 3.09 mmol) in H₂O (1.5 mL) and HCOOH (741.81 mg, 15.44 mmol, 6 mL) was stirred at 15° C. for 40 h. Upon completion, the reaction mixture was quenched by saturated aq. NaHCO₃ (300 mL) and extracted with EA (300 mL*2). The combined organic layers were washed with brine (300 mL), dried over Na₂SO₄, filtered and concentrated under reduced pressure to give a residue. The residue was purified by flash silica gel chromatography (ISCO®; 20 g SepaFlash® Silica Flash Column, Eluent of 0˜5% Methanol/Dichloromethane@ 45 mL/min) to give 5 (1.51 g, 85.19% yield) as a yellow solid. ESI-LCMS: 585.1 [M+Na]⁺; ¹H NMR (400 MHz, DMSO-d₆) δ=11.45 (d, J=1.8 Hz, 1H), 7.44 (d, J=8.2 Hz, 1H), 6.04 (d, J=7.5 Hz, 1H), 5.78-5.51 (m, 6H), 4.39 (t, J=4.4 Hz, 1H), 4.15 (dd, J=4.3, 7.4 Hz, 1H), 4.03 (q, J=7.1 Hz, 1H), 1.99 (s, 1H), 1.66 (dd, J=8.6, 10.8 Hz, 1H), 1.55-1.29 (m, 2H), 1.18 (d, J=2.0 Hz, 18H).

[0681] Preparation of (Example 39 monomer): To a solution of 5 (2.5 g, 4.44 mmol) in MeCN (30 mL) was added 3-bis(diisopropylamino)phosphanyloxypropanenitrile (1.74 g, 5.78 mmol, 1.84 mL) at 0° C., followed by 1H-imidazole-4,5-dicarbonitrile (577.36 mg, 4.89 mmol) in one portion under Ar. The mixture was gradually warmed to 20° C. and stirred at 20° C. for 1 h. The reaction mixture was quenched by addition of sat·NaHCO₃ solution (50 mL) and diluted with DCM (250 mL). The organic layer was washed with sat. NaHCO₃ solution (50 mL*2), dried over Na₂SO₄, filtered and concentrated under reduced pressure to give a residue. The residue was purified by a flash silica gel column (0% to 50% EA/PE with 0.5% TEA) to give Example 39 monomer (1.85 g, 54.1% yield) as a white solid. ESI-LCMS: 785.2 [M+Na]⁺; 1H NMR (400 MHz, CD₃CN) δ=9.18 (s, 1H), 7.31 (d, J=8.3 Hz, 1H), 6.06 (d, J=7.8 Hz, 1H), 5.72-5.60 (m, 5H), 4.85-4.76 (m, 1H), 4.27 (m, 1H), 3.93-3.64 (m, 4H), 3.41 (d, J=16.6 Hz, 3H), 2.80-2.62 (m, 2H), 1.76-1.49 (m, 3H), 1.23-1.19 (m, 30H); ³¹P NMR (162 MHz, CD₃CN) δ=150.66 (s), 150.30, 24.77, 24.66.

### Example 40: Synthesis of 5′ End Cap Monomer

[chemical structure]

[chemical structure]

[0682] Preparation of (2): To a solution of 1 (15 g, 137.43 mmol) in DCM (75 mL) were added Boc₂O (31.49 g, 144.30 mmol, 33.15 mL) and DMAP (839.47 mg, 6.87 mmol, 0.05 eq) at 0° C. The mixture was stirred at 20° C. for 16 hr, and concentrated under reduced pressure to give 2 (29.9 g, crude) as a yellow oil. ¹H NMR (400 MHz, CDCl₃) δ=3.23 (s, 3H), 3.16 (s, 3H), 1.51 (s, 9H).

[0683] Preparation of (3): To a solution of 2 (24.9 g, 118.99 mmol) in THF (250 mL) was added n-BuLi (2.5 M, 47.60 mL) dropwise at −78° C. under Ar and stirred at −78° C. for 1 hr. P-3 (17.19 g, 118.99 mmol, 12.83 mL) was added at 0° C. and stirred for 1 hr. The reaction mixture was quenched by saturated aq. NH₄Cl (100 mL), and then extracted with EA (100 mL*2). The combined organic layers were washed with brine (100 mL*2), dried over Na₂SO₄, filtered and concentrated under reduced pressure to give a residue. The residue was purified by flash silica gel chromatography (ISCO®; 80 g SepaFlash® Silica Flash Column, Eluent of 0˜50% Ethylacetate/Petroleum ether gradient @ 65 mL/min) to give 3 (7.1 g, 18.62% yield) as a yellow oil. ESI-LCMS: 339.9 [M+Na]⁺; ¹H NMR (400 MHz, CDCl₃) δ=4.12 (s, 1H), 4.08 (s, 1H), 3.83 (s, 3H), 3.81 (s, 3H), 3.22 (s, 3H), 1.51 (s, 9H).

[0684] Preparation of (5): To a mixture of 4 (15 g, 40.27 mmol) and PPTS (10.12 g, 40.27 mmol) in DMSO (75 mL) was added EDCI (23.16 g, 120.81 mmol) at 20° C. The mixture was stirred at 20° C. for 4 hr. The reaction mixture was diluted with water (150 mL) and extracted with EA (150 mL*2). The combined organic layers were washed with brine (150 mL*2), dried over Na₂SO₄, filtered and concentrated under reduced pressure to give 5 (12 g, crude) as a white solid. ESI-LCMS: 371.2 [M+H]⁺; ¹H NMR (400 MHz, CDCl₃) δ=9.77 (s, 1H), 7.62 (d, J=8.1 Hz, 1H), 5.83-5.76 (m, 2H), 4.53 (d, J=4.3 Hz, 1H), 4.43 (br t, J=4.4 Hz, 1H), 3.95 (br t, J=4.7 Hz, 1H), 3.47-3.35 (m, 5H), 0.92 (s, 9H), 0.13 (d, J=5.8 Hz, 6H).

[0685] Preparation of (6): To a solution of P4 (8.02 g, 25.27 mmol) in THF (40 mL) was added n-BuLi (2.5 M, 8.42 mL) dropwise under Ar at −78° C., and the mixture was stirred at −78° C. for 0.5 hr. A solution of 4 (7.8 g, 21.05 mmol) in THF (40 mL) was added dropwise. The mixture was allowed to warm to 0° C. and stirred for another 2 hr. The reaction mixture was quenched by saturated aq. NH₄Cl solution (80 mL) and extracted with EA (80 mL). The combined organic layers were washed with brine (80 mL*2), dried over Na₂SO₄, filtered and concentrated under reduced pressure to give a residue. The residue was purified by flash silica gel chromatography (ISCO®; 80 g SepaFlash® Silica Flash Column, Eluent of 0˜38% ethylacetate/petroleum ether gradient @ 60 mL/min) to give 7 (7.7 g, 13.43 mmol, 63.8% yield) as a white solid. ESI-LCMS: 506.2 [M−tBu]⁺; ¹H NMR (400 MHz, CDCl₃) δ=8.97 (s, 1H), 7.25 (d, J=8.3 Hz, 1H), 6.95-6.88 (m, 1H), 6.87-6.81 (m, 1H), 5.83-5.77 (m, 2H), 4.58 (dd, J=4.4, 6.7 Hz, 1H), 4.05 (dd, J=5.0, 7.5 Hz, 1H), 3.82-3.77 (m, 1H), 3.53 (s, 3H), 3.20 (s, 3H), 1.50 (s, 9H), 0.91 (s, 9H), 0.11 (d, J=2.5 Hz, 6H).

[0686] Preparation of (7): To a solution of 6 (7.7 g, 13.71 mmol) in MeOH (10 mL) was added HCl/MeOH (4 M, 51.40 mL) at 20° C. The mixture was stirred at 20° C. for 16 hr. Upon completion, the reaction mixture was concentrated under reduced pressure to remove MeOH. The residue was purified by flash silica gel chromatography (ISCO®; 80 g SepaFlash® Silica Flash Column, Eluent of 0˜4% MeOH/DCM @ 60 mL/min) to give 7 (4.1 g, 86.11% yield) as a white solid. ESI-LCMS: 369.9 [M+Na]⁺; ¹H NMR (400 MHz, DMSO-d₆) δ=11.44 (s, 1H), 7.66 (d, J=8.3 Hz, 1H), 7.11 (q, J=4.9 Hz, 1H), 6.69 (dd, J=6.0, 15.1 Hz, 1H), 6.56-6.47 (m, 1H), 5.82 (d, J=4.0 Hz, 1H), 5.67 (dd, J=2.0, 8.0 Hz, 1H), 5.56 (br s, 1H), 4.42 (t, J=6.1 Hz, 1H), 4.13 (t, J=5.8 Hz, 1H), 3.97 (t, J=4.8 Hz, 1H), 3.39 (s, 3H), 2.48 (d, J=5.3 Hz, 3H)

[0687] Preparation of (8): To a solution of 7 (2.5 g, 7.20 mmol) in THF (25 mL) was added Pd/C (2.5 g, 10% purity) under H₂ atmosphere, and the suspension was degassed and purged with H₂ for 3 times. The mixture was stirred under H₂ (15 Psi) at 20° C. for 1 hr. Upon completion, the reaction mixture was filtered and concentrated under reduced pressure to give a residue. The residue was purified by flash silica gel chromatography (ISCO®; 25 g SepaFlash® Silica Flash Column, Eluent of 0˜5% Ethylacetate/Petroleum ether gradient @ 50 mL/min) to give 8 (2.2 g, 87.49% yield) as a white solid. ESI-LCMS: 372.1 [M+Na]⁺; ¹H NMR (400 MHz, DMSO-d₆) δ=11.40 (s, 1H), 7.62 (d, J=8.0 Hz, 1H), 6.93 (q, J=4.9 Hz, 1H), 5.76 (d, J=4.5 Hz, 1H), 5.66 (d, J=8.0 Hz, 1H), 5.26 (d, J=6.3 Hz, 1H), 3.97 (q, J=5.9 Hz, 1H), 3.91-3.79 (m, 2H), 3.36 (s, 3H), 3.14-3.00 (m, 2H), 2.56 (d, J=5.0 Hz, 3H), 2.07-1.87 (m, 2H).

[0688] Preparation of (Example 40 monomer): To a solution of 8 (2.2 g, 6.30 mmol, 1 eq) in CH₃CN (25 mL) was added P-1 (2.47 g, 8.19 mmol, 2.60 mL, 1.3 eq) at 0° C., and then 1H-imidazole-4,5-dicarbonitrile (818.07 mg, 6.93 mmol, 1.1 eq) was added in one portion at 0° C. under Ar. The mixture was stirred at 20° C. for 2 hr. Upon completion, the reaction mixture was quenched by saturated aq. NaHCO₃ (25 mL), and extracted with DCM (25 mL*2). The combined organic layers were washed with brine (25 mL*2), dried over Na₂SO₄, filtered and concentrated under reduced pressure to give a residue. The residue was purified by flash silica gel chromatography (ISCO®; 40 g SepaFlash® Silica Flash Column, Eluent of 40˜85% ethylacetate/petroleum ether gradient @ 40 mL/min) to give Example 40 monomer (2.15 g, 61.32% yield) as a white solid. ESI-LCMS: 572.2 [M+Na]⁺; ¹H NMR (400 MHz, CD₃CN) δ=9.32 (br s, 1H), 7.39 (d, J=8.1 Hz, 1H), 5.82-5.75 (m, 1H), 5.66 (dd, J=0.7, 8.1 Hz, 1H), 5.14 (qd, J=4.9, 9.4 Hz, 1H), 4.24-4.02 (m, 2H), 3.99-3.93 (m, 1H), 3.90-3.60 (m, 4H), 3.43 (d, J=17.5 Hz, 3H), 3.18-3.08 (m, 2H), 2.74-2.61 (m, 5H), 2.19-2.11 (m, 1H), 2.09-1.98 (m, 1H), 1.19 (ddd, J=2.4, 4.0, 6.6 Hz, 12H). ³¹P NMR (162 MHz, CD₃CN) δ=149.77 (s), 149.63 (br s).

### Example 41

[chemical structure]

[chemical structure]

[chemical structure]

### Preparation of 2

[0689] Into a 5000-mL 3-necked round-bottom flask purged and maintained with an inert atmosphere of argon, was placed uridine (150.00 g, 614.24 mmol, 1.00 eq), pyridine (2.2 L), TBDPSCl (177.27 g, 644.95 mmol, 1.05 eq). The resulting solution was stirred overnight at room temperature. The resulting mixture was concentrated. The resulting solution was extracted with 3×1000 mL of dichloromethane and the organic layers combined. The resulting mixture was washed with 3×1 L of 0.5N HCl (aq.) and 2×500 mL of 0.5N NaHCO₃(aq.). The resulting mixture was washed with 2×1 L of H₂O. The mixture was dried over anhydrous sodium sulfate. The solids were filtered out. The filtrate was concentrated. This resulted in 262 g (crude) 2. LC-MS (m/z) 483.00 [M+H]⁺; 1 H NMR (400 MHz, DMSO-d₆) δ 11.35 (d, J=2.2 Hz, 1H), 7.70 (d, J=8.1 Hz, 1H), 7.64 (m, 4H), 7.52-7.40 (m, 6H), 5.80 (d, J=4.1 Hz, 1H), 5.50 (d, J=5.1 Hz, 1H), 5.28 (dd, J=8.0, 2.2 Hz, 1H), 5.17 (d, J=5.3 Hz, 1H), 4.15-4.05 (m, 2H), 4.00-3.85 (m, 2H), 3.85-3.73 (m, 1H), 1.03 (s, 9H).

### Preparation of 3

[0690] Into a 10 L 3-necked round-bottom flask purged and maintained with an inert atmosphere of argon, was placed a solution of 2 (260.00 g, 538.7 mmol, 1.0 eq.) in MeOH (5000 mL). This was followed by the addition of a solution of NaIO₄ (126.8 g, 592.6 mmol, 1.1 eq.) in H₂O (1600 mL) in several batches at 0° C. The resulting solution was stirred for 1 hr at room temperature. The reaction was then quenched by the addition of 3 L of Na₂S203 (sat.) at 0° C. The resulting solution was extracted with 3×1 L of dichloromethane and the organic layers combined and dried over anhydrous sodium sulfate. The solids were filtered out. The filtrate was concentrated. This resulted in 290 g (crude) of 3 as a white solid.

### Preparation of 4

[0691] Into a 5 L 3-necked round-bottom flask purged and maintained with an inert atmosphere of argon, was placed 3 (290 g, 603.4 mmol, 1.0 eq), EtOH (3 L). This was followed by the addition of NaBH₄ (22.8 g, 603.4 mmol, 1.0 eq), in portions at 0° C. The resulting solution was stirred for 1 hr at room temperature. The reaction was then quenched by the addition of 2000 mL of water/ice. The resulting solution was extracted with 3×1000 mL of dichloromethane and the organic layers combined and dried over anhydrous sodium sulfate. The solids were filtered out. The filtrate was concentrated. This resulted in 230 g (crude) of 4 as a white solid. LC-MS: m/z 485.10 [M+H]′. 1H NMR (400 MHz, DMSO-d₆) δ 11.28 (d, J=2.2 Hz, 1H), 7.63-7.37 (m, 11H), 5.84 (dd, J=6.4, 4.9 Hz, 1H), 5.44 (dd, J=8.0, 2.2 Hz, 1H), 5.11 (t, J=6.0 Hz, 1H), 4.78 (t, J=5.2 Hz, 1H), 3.65 (dd, J=11.4, 5.7 Hz, 1H), 3.60-3.52 (m, 5H), 3.18 (d, J=5.2 Hz, 1H), 0.96 (s, 9H).

### Preparation of 5

[0692] Into a 5000-mL 3-necked round-bottom flask purged and maintained with an inert atmosphere of argon, was placed a solution of 4 (120 g, 1 eq) in DCM (1200 mL). This was followed by the addition of DIEA (95.03 g, 3 eq) at 0 degrees C. To this was added methanesulfonic anhydride (129 g, 3 eq), in portions at 0° C. The resulting solution was stirred for 1 hr at room temperature. The reaction was then quenched by the addition of 1000 mL of water/ice. The resulting solution was extracted with 3×500 mL of dichloromethane and the organic layers combined and dried over anhydrous magnesium sulfate. The solids were filtered out. The filtrate was concentrated. This resulted in 160 g (crude) of 5 as a yellow solid; LC-MS (m/z) 641.05 [M+H]⁺.

### Preparation of 6

[0693] Into a 1 L round-bottom flask, was placed a solution of 5 (160.00 g, 1.00 equiv) in THF (1600 mL), DBU (108 g, 2.8 equiv). The resulting solution was stirred for 1 hr at 30° C. The reaction was then quenched by the addition of 3000 mL of water/ice. The resulting solution was extracted with 3×500 mL of dichloromethane and the organic layers combined and dried over anhydrous sodium sulfate. The solids were filtered out. The filtrate was concentrated. This resulted in 150 g (crude) of 6 as brown oil; LC-MS: (ES, m/z): 567.25 [M+H]⁺

[0694] ¹ HNMR (400 MHz, DMSO-d₆) δ 7.83 (d, J=7.4 Hz, 1H), 7.67-7.55 (m, 4H), 7.55-7.35 (m, 6H), 6.05 (dd, J=5.9, 1.7 Hz, 1H), 5.72 (d, J=7.4 Hz, 1H), 4.81 (dd, J=10.4, 5.8 Hz, 1H), 4.58-4.46 (m, 2H), 4.42 (p, J=5.2, 4.6 Hz, 1H), 4.33 (dd, J=10.6, 5.9 Hz, 1H), 3.79-3.70 (m, 2H), 3.23 (s, 3H), 0.98 (s, 9H).

### Preparation of 7

[0695] Into a 3000-mL round-bottom flask purged and maintained with an inert atmosphere of argon, was placed 6 (150.00 g, 201.950 mmol, 1. eq), DMF (1300.00 mL), potassium benzoate (44.00 g, 1.0 eq). The resulting solution was stirred for 1.5 hr at 80° C. The reaction was then quenched by the addition of 500 ml of water/ice. The resulting solution was extracted with 3×500 mL of dichloromethane The resulting mixture was washed with 3×1000 ml of H₂O. The resulting mixture was concentrated. The residue was applied onto a silica gel column with EA/PE (99:1). The collected fractions were combined and concentrated. This resulted in 40 g of 7 as yellow oil. LC-MS: m/z 571.20 [M+H]⁺; ¹HNMR: (400 MHz, DMSO-d₆) δ 7.97-7.91 (m, 2H), 7.89 (d, J=7.4 Hz, 1H), 7.74-7.51 (m, 7H), 7.51-7.31 (m, 6H), 6.16 (m, 1H), 5.76 (d, J=7.4 Hz, 1H), 4.78 (m, 1H), 4.61 (m, 1H), 4.55-4.46 (m, 2H), 4.38 (m, 1H), 3.82 (d, J=5.0 Hz, 2H), 0.97 (s, 9H)

### Preparation of 8b

[0696] Into a 2-L round-bottom flask, was placed 7 (30.00 g, 1 eq), MeOH (1.20 L), p-toluenesulfonic acid (4.50 g, 0.5 eq). The resulting solution was stirred for 2 hr at 70° C. The reaction was then quenched by the addition of 3 L of NaHCO₃ (sat.). The pH value of the solution was adjusted to 7 with NaHCO₃ (sat.). The resulting solution was extracted with 3×1 L of ethyl acetate and the organic layers combined and dried over anhydrous sodium sulfate. The solids were filtered out. The filtrate was concentrated under vacuum. The crude product was purified by Flash-Prep-HPLC with the following conditions (IntelFlash-1): Column, silica gel; mobile phase, PE/EA=50/50 increasing to PE/EA=25/75 within 30; Detector, 254. This resulted in 11.5 g (3.1% yield in seven steps) 8b as a white solid. LC-MS: m/z 625.15 [M+Na]⁺; ¹HNMR: (400 MHz, DMSO-d₆) δ 11.37 (d, J=2.3 Hz, 1H), 7.99-7.93 (m, 2H), 7.74-7.65 (m, 1H), 7.63-7.50 (m, 7H), 7.50-7.33 (m, 6H), 6.08 (t, J=6.0 Hz, 1H), 5.49 (m, 1H), 4.60 (m, 1H), 4.43 (m, 1H), 4.03-3.96 (m, 1H), 3.70 (d, J=5.3 Hz, 2H), 3.62-3.49 (m, 2H), 3.21 (s, 3H), 0.97 (s, 9H).

### Preparation of 9

[0697] Into a 2-L round-bottom flask, was placed 8b

[0698] (11.50 g). To the above 7M NH₃ (g) in MeOH (690.00 mL) was introduced in at 30° C. The resulting solution was stirred overnight at 30 degrees C. The resulting mixture was concentrated under vacuum. The crude product was purified by Flash with the following conditions (IntelFlash-1): Column, silica gel; mobile phase, PE/EA-60/40 increasing to PE/EA=1/99 within 60; Detector, 254. This resulted in 8.1 g (97% yield) of 9 as a white solid. LC-MS−: m/z 499.35 [M+H]⁺; ¹HNMR−: (300 MHz, DMSO-d₆) δ 11.31 (s, 1H), 7.64-7.50 (m, 5H), 7.48-7.35 (m, 6H), 6.02 (t, J=5.8 Hz, 1H), 5.45 (d, J=8.0 Hz, 1H), 4.80 (t, J=5.1 Hz, 1H), 3.58 (m, 7H), 3.27 (s, 3H), 0.96 (s, 9H).

### Preparation of 10

[0699] Into a 250-mL round-bottom flask, was placed 9 (8.10 g, 1 equiv), pyridine (80.0 mL), DMTr-Cl (7.10 g, 1.3 eq). The flask was evacuated and flushed three times with Argon. The resulting solution was stirred for 2 hr at room temperature. The reaction was then quenched by the addition of 500 mL of NaHCO₃ (sat.). The resulting solution was extracted with 2×500 mL of ethyl acetate and the organic layers combined and dried over anhydrous sodium sulfate. The solids were filtered out. The filtrate was concentrated under vacuum. The crude product was purified by Flash with the following conditions (IntelFlash-1): Column, C18; mobile phase, ACN/H₂O=5/95 increasing to ACN/H₂O=95/5 within 30; Detector, 254. This resulted in 11.5 g (88% yield) of 10 as a white solid; LC-MS: m/z 823.40 [M+Na]⁺; 1HNMR: (300 MHz, DMSO-d₆) δ 11.37 (s, 1H), 7.55-7.18 (m, 20H), 6.92-6.83 (m, 4H), 6.14 (t, J=5.9 Hz, 1H), 5.48 (d, J=8.0 Hz, 1H), 3.74 (m, 7H), 3.57 (m, 4H), 3.25 (m, 5H), 0.84 (s, 9H).

### Preparation of 11

[0700] Into a 1000-mL round-bottom flask, was placed 10 (11.5 g, 1.00 eq), THF (280.00 mL), TBAF (14.00 mL, 1.00 eq). The resulting solution was stirred for 3 hr at room temperature. The reaction was then quenched by the addition of 1 L of water. The resulting solution was extracted with 3×500 mL of ethyl acetate and the organic layers combined and dried over anhydrous sodium sulfate. The solids were filtered out. The filtrate was concentrated under vacuum. The crude product was purified by Flash with the following conditions (IntelFlash-1): Column, C18; mobile phase, ACN/H₂O=5/95 increasing to ACN/H₂O=95/5 within 30; Detector, 254. This resulted in 7.8 g (98% yield) of 11 as a white solid. LC-MS: m/z 561.20 [M−H]⁻; ¹HNMR: (300 MHz, DMSO-d₆) δ 11.32 (s, 1H), 7.66 (d, J=8.1 Hz, 1H), 7.52-7.39 (m, 2H), 7.39-7.20 (m, 7H), 6.96-6.83 (m, 4H), 6.17 (t, J=5.9 Hz, 1H), 5.63 (d, J=8.0 Hz, 1H), 4.63 (t, J=5.6 Hz, 1H), 3.90-3.46 (m, 9H), 3.26 (s, 5H), 3.19-2.98 (m, 2H).

### Preparation of 12

[0701] Into a 3-L round-bottom flask, was placed 11 (7.80 g, 1.00 eq), DCM (300.00 mL), NaHCO₃ (3.50 g, 3 eq). This was followed by the addition of Dess-Martin (7.06 g, 1.2 equiv) with stirring at 0° C., and the resulting solution was stirred for 20 min at 0° C. The resulting solution was stirred for 5 hr at room temperature. The reaction mixture was cooled to 0 degree C. with a water/ice bath. The reaction was then quenched by the addition of 500 mL of NaHCO₃: Na₂S203=1:1. The resulting solution was extracted with 3×500 mL of ethyl acetate and the organic layers combined and dried over anhydrous sodium sulfate. The solids were filtered out. The filtrate was concentrated under vacuum. The crude product was purified by Flash with the following conditions (IntelFlash-1): Column, C18; mobile phase, ACN/H₂O=5/95 increasing to ACN/H₂O=95/5 within 30; Detector, 254. This resulted in 5.8 g (75% yield) of 12 as a white solid. LC-MS: m/z 558.80 [M−H]⁻; ¹HNMR−: (300 MHz, DMSO-d₆) δ 11.35-11.22 (m, 1H), 9.43 (s, 1H), 7.75 (d, J=8.1 Hz, 1H), 7.49-7.19 (m, 8H), 6.90 (m, 5H), 6.00 (t, J=5.9 Hz, 1H), 5.66 (m, 1H), 4.40 (m, 1H), 3.75 (s, 7H), 3.70-3.56 (m, 3H), 3.29 (d, J=3.7 Hz, 3H).

### Preparation of 13

[0702] Into a 250-mL 3-round-bottom flask, was placed THF (150.00 mL), NaH (1.07 g, 60% w, 3.00 equiv). The flask was evacuated and flushed three times with Argon, and the reaction mixture was cooled to −78° C. This was followed by the addition of [[(bis[[(2,2-dimethylpropanoyl)oxy]methoxy]phosphoryl)methyl([(2,2-dimethylpropanoyl)oxy]methoxy)phosphoryl]oxy]methyl 2,2-dimethylpropanoate (14.60 g, 2.6 eq, in 60 m L THF) dropwise with stirring at −78° C. in 10 min, and the resulting solution was stirred for 30 min at −78° C. This was followed by the addition of 12 (5.00 g, 1.00 eq, in 50 mL THF) dropwise with stirring at −78° C. in 10 min. The resulting solution was stirred for 4 hr at room temperature. The reaction was then quenched by the addition of 400 mL of NH₄Cl (sat.). The resulting solution was extracted with 3×400 mL of ethyl acetate and the organic layers combined and dried over anhydrous sodium sulfate. The solids were filtered out. The filtrate was concentrated under vacuum. The crude product was purified by Flash with the following conditions (IntelFlash-1): Column, C18; mobile phase, ACN/H₂O=5/95 increasing to ACN/H₂O=95/5 within 30; Detector, 254. This resulted in 7.2 g (crude) of 13 as a solid. LC-MS: m/z: 865.10 [M−H].⁻

### Preparation of 14

[0703] Into a 500-mL round-bottom flask, was placed 13

[0704] (6.00 g), H₂O (30.00 mL), AcOH (120.00 mL). The resulting solution was stirred for 1 hr at 50 degrees C. The reaction mixture was cooled to 0 degree C. with a water/ice bath. The reaction was then quenched by the addition of 2 L of NaHCO₃ (sat.). The pH value of the solution was adjusted to 7 with NaHCO₃ (sat.). The resulting solution was extracted with 3×500 mL of ethyl acetate and the organic layers combined and dried over anhydrous sodium sulfate. The solids were filtered out. The filtrate was concentrated under vacuum. The crude product was purified by Flash with the following conditions (IntelFlash-1): Column, C18; mobile phase, ACN/H₂O=5/95 increasing to ACN/H₂O=95/5 within 30; Detector, 254. This resulted in 2.6 g (44% yield in two steps) of 14 as yellow oil. LC-MS: m/z 587.25 [M+Na]⁺; ¹HNMR: (300 MHz, DMSO-d₆) δ 11.31 (s, 1H), 7.73 (d, J=8.1 Hz, 1H), 6.63 (ddd, J=24.2, 17.2, 4.2 Hz, 1H), 6.14-5.96 (m, 2H), 5.65-5.48 (m, 5H), 5.09 (t, J=5.6 Hz, 1H), 4.17 (s, 1H), 3.65 (d, J=6.1 Hz, 2H), 3.52 (m, 2H), 3.27 (s, 3H), 1.15 (d, J=3.7 Hz, 18H); ³¹PNMR−: (162 MHz, DMSO-d₆) δ 17.96.

### Preparation of 15

[0705] Into a 250-mL 3-necked round-bottom flask, was placed DCM (60.00 mL), DCI (351.00 mg, 1.2 eq), 3-[[bis(diisopropylamino)phosphanyl]oxy]propanenitrile (971.00 mg, 1.3 eq), 4A MS. The flask was evacuated and flushed three times with Argon, and the reaction mixture was cooled to 0° C. This was followed by the addition of 14 (1.40 g, 1.00 eq, in 30 mL DCM) dropwise with stirring at 0° C. in 30 second. The resulting solution was stirred for 1 hr at room temperature. The reaction was then quenched by the addition of 50 mL of water. The resulting solution was extracted with 3×50 mL of ethyl acetate and the organic layers combined. The resulting mixture was washed with 3×50 ml of NaCl (sat.). The mixture was dried over anhydrous magnesium sulfate. The solids were filtered out. The filtrate was concentrated under vacuum. The crude product was purified by Prep-Archiral-SFC with the following conditions: Column: Ultimate Diol, 2*25 cm, 5 [symbol] Ìm; Mobile Phase A: CO₂, Mobile Phase B: ACN (0.2% TEA); Flow rate: 50 mL/min; Gradient: isocratic 30% B; Column Temperature (20° C.): 35; Back Pressure (bar): 100; Wave Length: 254 nm; RT1 (min): 2.58; Sample Solvent: MeOH-HPLC; Injection Volume: 1 mL; Number Of Runs: 4. This resulted in 1.31 g (65% yield) 15 as yellow oil. LC-MS: m/z 763.40 [M−H]⁻; ¹HNMR−: (300 MHz, Acetonitrile-d₃) δ 9.05 (s, 1H), 7.51 (d, J=8.1 Hz, 1H), 6.64 (dddd, J=23.8, 17.1, 4.8, 1.9 Hz, 1H), 6.23-5.92 (m, 2H), 5.70-5.51 (m, 5H), 4.38 (d, J=4.9 Hz, 1H), 3.96-3.56 (m, 8H), 3.35 (s, 3H), 2.70 (m, 2H), 1.33-1.14 (m, 30H); 31 PNMR−: (Acetonitrile-d₃) δ 148.75, 148.53, 16.68.

### Example 42

[chemical structure]

[chemical structure]

### Preparation of 1

[0706] A solution of 7 from Example 41 (23 g, 40.300 mmol, 1.00 equiv) and p-TsOH (9.02 g, 52.390 mmol, 1.3 equiv) in MeOH (1000 mL) was stirred for overnight at 40° C. under argon atmosphere. The reaction was quenched with sat. sodium bicarbonate (aq.) at 0 degrees C. The resulting mixture was extracted with EtOAc (2×500 mL). The combined organic layers were washed with water (2×500 mL), dried over anhydrous MgSO₄. After filtration, the filtrate was concentrated under reduced pressure. The residue was purified by reverse flash chromatography with the following conditions: column, C18 silica gel; mobile phase, ACN in water, 10% to 90% gradient in 30 min; detector, UV 254 nm. This resulted in 1 (5.3 g, 36. %) as a colorless oil; LC-MS: (ES, m/z): 365 [M+H]⁺; ¹H-NMR: (300 MHz, DMSO-d₆) δ 11.20 (s, 1H), 8.09-7.78 (m, 2H), 7.63-7.50 (m, 2H), 7.51-7.35 (m, 2H), 5.95 (t, J=5.9 Hz, 1H), 5.51 (d, J=8.1 Hz, 1H), 4.73 (t, J=5.7 Hz, 1H), 4.41 (dd, J=11.9, 3.3 Hz, 1H), 4.17 (dd, J=11.9, 6.3 Hz, 1H), 3.69 (dq, J=10.1, 6.8, 6.3 Hz, 1H), 3.48-3.40 (m, 2H), 3.39-3.29 (m, 2H), 3.07 (s, 3H).

### Preparation of 2

[0707] Into a 250-mL 3-necked round-bottom flask, was placed 1 (7.00 g, 19.212 mmol, 1.00 equiv), ACN (60.00 mL), H₂O (60.00 mL), TEMPO (0.72 g, 4.611 mmol, 0.24 equiv), BAIB (13.61 g, 42.267 mmol, 2.20 equiv). The resulting solution was stirred for 1 overnight at 30° C. The reaction was then quenched by the addition of 200 ml of water/ice. The resulting solution was extracted with 2×200 mL of ethyl acetate, The resulting mixture was washed with 2×200 ml of water. The mixture was dried over anhydrous sodium sulfate and concentrated. The crude product was purified by Flash-Prep-HPLC with the following conditions (IntelFlash-1): Column, C18 silica gel; mobile phase, ACN/H₂O=5/95 increasing to ACN/H₂O=95/5 within 30 min; Detector, UV 254 nm; product was obtained. This resulted in 5 g (68.8%) of 2 as a solid. LC-MS: (ES, m/z): 379 [M+H]⁺; ¹H NMR (300 MHz, DMSO-d₆) δ 13.24 (s, 1H), 11.31 (d, J=2.2 Hz, 1H), 8.18-7.83 (m, 2H), 7.81-7.63 (m, 2H), 7.61-7.42 (m, 2H), 6.01 (t, J=6.0 Hz, 1H), 5.61 (dd, J=8.0, 2.2 Hz, 1H), 4.72-4.40 (m, 3H), 3.73-3.55 (m, 2H), 3.22 (s, 3H).

### Preparation of 3

[0708] Into a 250-mL round-bottom flask, was placed 2 (4.5 g, 11.894 mmol, 1.00 equiv), DMF (90.00 mL), Pb(OAc)₄ (15.82 g, 35.679 mmol, 3.00 equiv). The resulting solution was stirred overnight at 30° C. The reaction was then quenched by the addition of 200 mL of water/ice. The resulting solution was extracted with 2×200 mL of ethyl acetate The resulting mixture was washed with 2×200 ml of water. The mixture was dried over anhydrous sodium sulfate and concentrated. The crude product was purified by Flash with the following conditions (IntelFlash-1): Column, C18 silica gel; mobile phase, ACN/H₂O-5/95 increasing to ACN/H₂O=95/5 within 30 min; Detector, UV 254 nm; product was obtained. This resulted in 4 g 3 as oil; LC-MS: (ES, m/z): 415 [M+Na]⁺; ¹H NMR (300 MHz, DMSO-d₆) δ 11.39 (s, 1H), 7.93 (dd, J=24.2, 7.6 Hz, 2H), 7.75-7.46 (m, 4H), 6.35-6.03 (m, 2H), 5.71-5.47 (m, 1H), 4.60-4.14 (m, 2H), 3.88-3.54 (m, 2H), 3.26 (d, J=6.7 Hz, 3H), 2.03 (d, J=49.7 Hz, 3H).

### Preparation of 4

[0709] Into a 250-mL 3-necked round-bottom flask purged and maintained with an inert atmosphere of argon, was placed 3 (4.00 g, 10.195 mmol, 1.00 eq), DCM (80.00 mL), dimethyl hydroxymethylphosphonate (22.85 g, 163.114 mmol, 16.00 eq), BF₃·Et₂O (28.94 g, 203.91 mmol, 20 eq). The resulting solution was stirred overnight at room temperature. The reaction was then quenched by the addition of 500 mL of water/ice. The resulting solution was extracted with 2×500 mL of ethyl acetate The resulting mixture was washed with 2×500 ml of water. The mixture was dried over anhydrous sodium sulfate and concentrated. The residue was applied onto a silica gel column with dichloromethane/methanol (20/1). This resulted in 2 g (41.5%) of 4 as a solid.

[0710] LC-MS: (ES, m/z): 490 [M+H₂O]⁺; ¹H-NMR (300 MHz, DMSO-d₆) δ 11.39 (d, J=5.4 Hz, 1H), 7.96 (dt, J=11.5, 9.3 Hz, 2H), 7.81-7.40 (m, 4H), 6.29-5.98 (m, 1H), 5.56 (dd, J=12.2, 8.1 Hz, 1H), 5.28-4.99 (m, 1H), 4.29 (dp, J=25.1, 5.9 Hz, 2H), 4.16-3.84 (m, 2H), 3.75-3.53 (m, 7H), 3.28 (d, J=12.5 Hz, 2H).

### Preparation of 5

[0711] Into a 100-mL round-bottom flask, was placed 4 (2.00 g, 4.234 mmol, 1.00 equiv), 7M NH₃ (g) in THF (20.00 mL) was added. The resulting solution was stirred overnight at 25° C. The resulting mixture was concentrated under vacuum. The crude product was purified by prep-sfc Column: Lux 5 um i-Cellulose-5, 3*25 cm, 5 um; Mobile Phase A: CO₂, Mobile Phase B: MeOH (0.1% 2M NH₃-MEOH); Flow rate: 70 mL/min; Gradient: isocratic 50% B; Column Temperature (25° C.): 35; Back Pressure (bar): 100; Wave Length: 220 nm; RT1 (min): 3.75; RT2 (min): 4.92; Sample Solvent: MeOH:DCM=1:1; Injection Volume: 1 mL; Number Of Runs: 15, This resulted in 330 mg (21.2%) of 5 as a solid. ¹H-NMR−: (300 MHz, DMSO-d₆) δ 11.14 (s, 1H), 7.63 (d, J=8.1 Hz, 1H), 6.06 (t, J=5.9 Hz, 1H), 5.64 (d, J=8.0 Hz, 1H), 4.89 (s, 1H), 4.63 (t, J=5.3 Hz, 1H), 3.98 (d, J=9.8 Hz, 2H), 3.70 (dd, J=10.7, 1.2 Hz, 8H), 3.63 (dd, J=6.0, 3.2 Hz, 1H), 3.29 (s, 3H).

### Preparation of 6

[0712] To a stirred solution of 3-{[bis(diisopropylamino)phosphanyl]oxy}propanenitrile (324.10 mg, 1.075 mmol, 1.2 equiv) and 1H-imidazole-4,5-dicarbonitrile (126.99 mg, 1.075 mmol, 1.2 equiv) in DCM (10 mL) was added 5 (330 mg, 0.9 mmol, 1.00 eq) dropwise at 25° C. under argon atmosphere. The resulting mixture was stirred for 30 min at 25 degrees C. The reaction was quenched with water/ice. The resulting mixture was extracted with EtOAc (2×10 mL). The combined organic layers were washed with water (2×10 mL), dried over anhydrous MgSO₄. After filtration, the filtrate was concentrated under reduced pressure. Column: Ultimate Diol, 2*25 cm, 5 μm; Mobile Phase A: CO₂, Mobile Phase B: ACN; Flow rate: 50 mL/min; Gradient: isocratic 30% B; Column Temperature (25° C.): 35; Back Pressure (bar): 100; Wave Length: 254 nm; RT1 (min): 3.95; Sample Solvent: ACN; Injection Volume: 1 mL; Number Of Runs: 10, This resulted in 6 (349 mg, 68.4%) as a light yellow oil. LC-MS: (ES, m/z): 567.25 [M+H]⁺; ¹H-NMR: (300 MHz, DMSO-d₆) δ 11.38 (s, 1H), 7.64 (dd, J=8.0, 1.3 Hz, 1H), 6.09 (dt, J=5.8, 3.4 Hz, 1H), 5.65 (dd, J=8.0, 3.2 Hz, 1H), 4.83 (q, J=5.5 Hz, 1H), 4.03 (dt, J=9.7, 2.2 Hz, 2H), 3.83-3.40 (m, 14H), 3.30 (s, 3H), 2.77 (t, J=5.9 Hz, 2H), 1.12 (ddd, J=9.2, 6.7, 1.7 Hz, 12H); ³¹P NMR (DMSO-d₆) δ 148.0, 147.6, 23.1

### Example 43

[chemical structure]

### Preparation of 1

[0713] Into a 100-mL round-bottom flask, was placed 2 4 from Example 42 (2.00 g, 4.234 mmol, 1.00 equiv), 7M NH₃(g) in THF (20.00 mL) was added. The resulting solution was stirred overnight at 25° C. The resulting mixture was concentrated under vacuum. The crude product was purified by prep-sfc Column: Lux 5 um i-Cellulose-5, 3*25 cm, 5 μm; Mobile Phase A: CO₂, Mobile Phase B: MeOH (0.1% 2M NH₃-MeOH); Flow rate: 70 mL/min; Gradient: isocratic 50% B; Column Temperature (C): 35; Back Pressure (bar): 100; Wave Length: 220 nm; RT1 (min): 3.75; RT2 (min): 4.92; Sample Solvent: MeOH:DCM=1:1; Injection Volume: 1 mL; Number Of Runs: 15, This resulted in 320 mg (22.8%) of 1 as a solid. 1H-NMR− −14-3-40: (300 MHz, DMSO-d₆) δ 11.11 (s, 1H), 7.70 (d, J=8.0 Hz, 1H), 6.03 (t, J=6.1 Hz, 1H), 5.64 (d, J=8.0 Hz, 1H), 4.97 (s, 1H), 4.76 (t, J=5.3 Hz, 1H), 4.07-3.85 (m, 1H), 3.79 (dd, J=13.9, 9.3 Hz, 1H), 3.73-3.55 (m, 9H), 3.41 (d, J=5.0 Hz, 2H), 3.28 (s, 3H).

### Preparation of 2

[0714] To a stirred solution/mixture of 3-{[bis(diisopropylamino)phosphanyl]oxy}propanenitrile (517.58 mg, 1.717 mmol, 1.2 equiv) and 1H-imidazole-4,5-dicarbonitrile (202.79 mg, 1.717 mmol, 1.2 equiv) in DCM was added 1 (527 mg, 1.431 mmol, 1.00 eq.) dropwise at 25° C. under argon atmosphere. The resulting mixture was stirred for 30 min at 25° C. The reaction was quenched with Water/Ice. The resulting mixture was extracted with EtOAc (2×10 mL). The combined organic layers were washed with water (2×10 mL), dried over anhydrous MgSO₄. After filtration, the filtrate was concentrated under reduced pressure. Column: Ultimate Diol, 2*25 cm, 5 μm; Mobile Phase A: CO₂, Mobile Phase B: ACN (0.1% DEA)-HPLC-merk; Flow rate: 50 mL/min; Gradient: isocratic 30% B; Column Temperature (C): 35; Back Pressure (bar): 100; Wave Length: 254 nm; RT1 (min): 4.57; Sample Solvent: ACN; Injection Volume: 1 mL; Number Of Runs: 10 to afford 2 (264.8 mg, 31.7%) as a light yellow oil. LC-MS: (ES, m/z): 567.25 [M−H]⁻; ¹H NMR (300 MHz, DMSO-d₆) δ 13.24 (s, 1H), 11.31 (d, J=2.2 Hz, 1H), 8.18-7.83 (m, 2H), 7.81-7.63 (m, 2H), 7.61-7.42 (m, 2H), 6.01 (t, J=6.0 Hz, 1H), 5.61 (dd, J=8.0, 2.2 Hz, 1H), 4.72-4.40 (m, 3H), 3.73-3.55 (m, 2H), 3.22 (s, 3H); ³¹P NMR (DMSO-d₆) δ 148.01, 147.67, 22.8.

### Example 44

[chemical structure]

### Preparation of 1

[0715] To a stirred mixture of ascorbic acid (100.00 g, 567.78 mmol, 1.00 equiv) and CaCO₃ (113.0 g, 1129.02 mmol, 2 equiv) in H₂O (1.00 L) was added H₂O₂ (30%) (236.0 g, 6938.3 mmol, 12.22 equiv) dropwise at 0° C. The resulting mixture was stirred overnight at room temperature. The mixture was treat with charcoal and heat to 70 degrees until the no more peroxide was detected. The resulting mixture was filtered, the filter cake was washed with warm water (3×300 mL). The filtrate was concentrated under reduced pressure. The solid was diluted with MeOH (200 mL) and the mixture was stirred for 5 h. The resulting mixture was filtered, the filter cake was washed with MeOH (3×80 mL). The filtrate was concentrated under reduced pressure to afford L-threonate (86 g, 96.6%) as a white crude solid. ¹H-NMR−: (300 MHz, Deuterium Oxide) δ 4.02 (dd, J=4.6, 2.4 Hz, 1H), 3.91 (ddt, J=7.6, 5.3, 2.2 Hz, 1H), 3.78-3.44 (m, 2H).

### Preparation of 2

[0716] Into a 5 L round-bottom flask were added L-threonate (70.00 g, 518.150 mmol, 1.00 equiv) and H₂O (2 L) at room temperature. The residue was acidified to pH=1 with Dowex 50wX8, H(+)-Form). The resulting mixture was stirred for 1 h at 70° C. The resulting mixture was filtered, the filter cake was washed with water (2×1 L). The filtrate was concentrated under reduced pressure. The solid was co-evaporated with (2×2 L). Then the solid was diluted with ACN (700.00 mL), and the TsOH (5.35 g, 31.089 mmol, 0.06 equiv) was added. The resulting mixture was stirred for 1 h at 80 degrees C. under air atmosphere. The resulting mixture was filtered, the filter cake was washed with ACN (2×500 mL). The filtrate was concentrated under reduced pressure to 2 (70 g, crude) as a yellow oil.

### Preparation of 3

[0717] To a stirred solution of (2 (70.0 g crude, 593.2 mmol, 1.00 eq.) in pyridine (280.00 mL) was added benzoyl chloride (207.62 g, 1.483 mol, 2.5 equiv) dropwise at 0° C. under argon atmosphere. The resulting mixture was stirred for 1 h at room temperature under argon atmosphere. The reaction was quenched by the addition of sat. NaHCO₃(aq.) (500 mL) at 0 degrees C. The resulting mixture was extracted with CH₂Cl₂ (3×500 mL). The combined organic layers were washed with brine (2×300 mL), dried over anhydrous Na₂SO₄. After filtration, the filtrate was concentrated under reduced pressure. The residue was purified by silica gel column chromatography, eluted with PE/EtOAc to afford (3 (80 g, 41.4%) as an off-white solid. LC-MS: (ES, m/z): 327 [M+H]⁺; ¹H-NMR: (300 MHz, CDCl₃) δ 8.18-8.04 (m, 4H), 7.68-7.61 (m, 2H), 7.50 (tt, J=7.1, 1.4 Hz, 4H), 5.96-5.57 (m, 2H), 5.11-5.00 (m, 1H), 4.45-4.35 (m, 1H).

### Preparation of 4

[0718] To a stirred solution of 3 (125 g, 383.078 mmol, 1.00 eq) in THF (1.50 L) was added DIBAL-H (1M) (600 mL, 2 eq) dropwise at −78° C. under argon atmosphere. The resulting mixture was stirred for 1 h at −78 degrees C. under argon atmosphere. Desired product was detected by LCMS. The reaction was quenched with MeOH at 0° C. The resulting mixture was diluted with EtOAc (600 mL). Then the resulting mixture was filtered, the filter cake was washed with EtOAc (3×800 mL). The filtrate was concentrated under reduced pressure. This resulted in 4 (73 g, crude) as a colorless solid. LC-MS: (ES, m/z): 392 [M+Na+ACN]+; 1H-NMR−: (400 MHz, Chloroform-d) δ 8.22-7.99 (m, 8H), 7.62 (dtd, J=7.4, 4.4, 2.2 Hz, 4H), 7.48 (td, J=7.8, 2.4 Hz, 8H), 5.87 (d, J=4.3 Hz, 1H), 5.77 (dt, J=6.6, 3.6 Hz, 1H), 5.56 (d, J=4.9 Hz, 2H), 5.50 (t, J=4.3 Hz, 1H), 4.73 (s, 1H), 4.63 (ddd, J=10.4, 7.9, 6.1 Hz, 2H), 4.28 (dd, J=10.3, 3.8 Hz, 1H), 3.99 (dd, J=10.6, 3.2 Hz, 1H).

### Preparation of 5

[0719] To a stirred solution of (4 (73.00 g, 222.344 mmol, 1.00 equiv) and DMAP (271.63 mg, 2.223 mmol, 0.01 equiv) and pyridine (365.00 mL) in DCM (365.00 mL) were added Ac₂O (24.97 g, 244.6 mmol, 1.1 equiv) dropwise at 0 degrees C. under argon atmosphere. The resulting mixture was stirred for 1 h at room temperature under argon atmosphere. The reaction was quenched with sat. NaHCO₃(aq.) at 0 degrees C. The resulting mixture was extracted with CH₂Cl₂ (3×500 mL). The combined organic layers were washed with sat. CuSO₄ (3×200 mL), dried over anhydrous Na₂SO₄. After filtration, the filtrate was concentrated under reduced pressure. The residue was purified by silica gel column chromatography, eluted with PE/EtOAc to afford 5 (60 g, 73%) as a colorless oil. LC-MS: (ES, m/z): 434 [M+Na+ACN]⁺; 1H-NMR: (400 MHz, Chloroform-d) δ 8.17-8.02 (m, 8H), 7.63 (tddd, J=7.9, 6.6, 3.2, 1.6 Hz, 4H), 7.57-7.44 (m, 8H), 6.66 (d, J=4.5 Hz, 1H), 6.40 (s, 1H), 5.83-5.53 (m, 4H), 4.67 (ddd, J=23.4, 10.5, 6.2 Hz, 2H), 4.24 (dd, J=10.5, 3.8 Hz, 1H), 4.19-4.01 (m, 1H), 2.18 (s, 3H), 2.06 (d, J=3.2 Hz, 3H).

### Preparation of 6

[0720] To a stirred mixture of 5 (50.00 g, 135.005 mmol, 1.00 eq) and uracil (15.13 g, 135.005 mmol, 1 eq) in can (500.00 mL) was added BSA (54.81 g, 270.010 mmol, 2 eq) in portions at room temperature under air atmosphere. The resulting mixture was stirred for 1 h at 60° C. under argon atmosphere. After that, the TMSOTf (90.02 g, 405.0 mmol, 3 eq) was added dropwise at 0° C. The resulting mixture was stirred for 2 h at 60° C. under argon atmosphere. The mixture was neutralized to pH=7 with saturated NaHCO₃(aq.) at 0° C. The resulting mixture was extracted with CH₂Cl₂ (3×400 mL). The combined organic layers were washed with brine (2×400 mL), dried over anhydrous Na₂SO₄. After filtration, the filtrate was concentrated under reduced pressure. The residue was purified by silica gel column chromatography, eluted with PE/EtOAc (1:1) to afford 6 (43 g, 75.4%) as a white solid. LC-MS: (ES, m/z): [M+H]⁺; 423 464 [M+H+ACN]+; 1H-NMR−: (300 MHz, Chloroform-d) δ 9.08-8.89 (m, 1H), 8.17-7.94 (m, 4H), 7.70-7.43 (m, 7H), 6.19 (d, J=1.9 Hz, 1H), 5.84-5.71 (m, 2H), 5.62 (td, J=3.3, 2.8, 1.4 Hz, 1H), 4.59-4.44 (m, 2H), 4.14 (q, J=7.2 Hz, 1H).

### Preparation of 7

[0721] A solution of 6 (52.00 g, 123.108 mmol, 1 eq) was dissolved in 642 ml of MeOH/H₂O/TEA (5:1:1) at room temperature and heat to reflux until no more starting material was detected (2˜3 h). The resulting mixture was concentrated under reduced pressure. The residue was dissolved in EtOAc (600 mL) and the organic layer was extracted with water (5×800 mL). The aqueous layer was concentrated under vacuum to afford 7 (21 g, crude) as a off-white solid. The crude product was used in the next step directly without further purification. LC-MS−: (ES, m/z): 213 [M−H]⁻; 1 H-NMR: (300 MHz, DMSO-d₆) δ 11.26 (s, 1H), 7.68 (d, J=8.1 Hz, 1H), 5.75 (s, 1H), 5.65 (d, J=1.2 Hz, 1H), 5.59 (d, J=8.1 Hz, 1H), 5.39 (s, 1H), 4.10-3.97 (m, 4H).

### Preparation of 8

[0722] To a stirred mixture of 7 (16.00 g, 74.705 mmol, 1.00 equiv) and DBU (22.75 g, 149.409 mmol, 2 equiv) in DCM (80.00 mL) and DMF (200.00 mL) was added DMTr-Cl (7.88 g, 25.680 mmol, 1.1 equiv) dropwise at room temperature under argon atmosphere. The resulting mixture was stirred for 2 h at room temperature under argon atmosphere. The reaction was quenched by the addition of sat. NaHCO₃(aq.) (100 mL) at 0 degrees C. The resulting mixture was extracted with EtOAc (3×60 mL). The combined organic layers were washed with brine (2×50 mL), dried over anhydrous Na₂SO₄. After filtration, the filtrate was concentrated under reduced pressure. The residue was purified by silica gel column chromatography, eluted with PE (0.5% TEA)/EtOAc (2:3) to afford 8 (25 g, 64.8%) as a off-white solid; LC-MS: (ES, m/z): 515 [M−H]⁻; ¹H-NMR: (400 MHz, DMSO-d₆) δ 11.33 (s, 1H), 7.57 (d, J=8.1 Hz, 1H), 7.45-7.13 (m, 9H), 6.86 (t, J=8.5 Hz, 4H), 5.94 (d, J=1.7 Hz, 1H), 5.58 (d, J=8.1 Hz, 1H), 5.15 (d, J=2.6 Hz, 1H), 3.97-3.79 (m, 3H), 3.73 (d, J=2.3 Hz, 6H), 3.33 (d, J=2.5 Hz, 1H).

### Preparation of 9

[0723] To a stirred solution of 8 (6.00 g, 11.616 mmol, 1.00 eq) in THF (240.00 mL) was added NaH (60%) (1.40 g, 35.003 mmol, 3 eq) dropwise at 0° C. under argon atmosphere. The resulting mixture was stirred for 30 min at 0 degrees C. under argon atmosphere. Then the dimethyl ethenylphosphonate (15.81 g, 116.2 mmol, 10.00 eq) was added and the resulting mixture was stirred overnight at room temperature under argon atmosphere. The reaction was quenched with sat. NH₄Cl (aq.) at room temperature. The resulting mixture was extracted with EtOAc (3×100 mL). The combined organic layers were washed with brine (3×80 mL), dried over anhydrous Na₂SO₄. After filtration, the filtrate was concentrated under reduced pressure. The residue was purified by reverse flash chromatography with the following conditions: column, C18 mobile phase, ACN in water, 5% to 95% gradient in 30 min; detector, UV 254 nm to afford 9 (3.65 g, 48.15%) as a white solid.

[0724] LC-MS: (ES, m/z): 675 [M+Na]+; 1H-NMR−: (300 MHz, DMSO-d₆) δ 11.39 (s, 1H), 7.44-7.36 (m, 3H), 7.34-7.21 (m, 7H), 6.93-6.83 (m, 4H), 6.08 (d, J=2.0 Hz, 1H), 5.55 (d, J=8.1 Hz, 1H), 4.08 (d, J=11.0 Hz, 1H), 3.92 (d, J=2.0 Hz, 1H), 3.82-3.71 (m, 7H), 3.57 (dd, J=10.9, 3.6 Hz, 6H), 3.30-3.23 (m, 1H), 3.06-2.86 (m, 2H), 1.96 (dt, J=18.1, 7.1 Hz, 2H).

### Preparation of 10

[0725] A solution of 9 (2.80 g, 4.3 mmol, 1.00 equiv) in AcOH (12.00 mL) and H₂O (3.00 mL) was stirred for overnight at room temperature under air atmosphere. The reaction was quenched with sat. NaHCO₃(aq.) at 0 degrees C. The resulting mixture was washed with 3×20 mL of CH₂Cl₂. The product in the water layer. The water layer was concentrated under reduced pressure. The product was purified by Prep-SFC with the following conditions (Prep SFC80-2): Column, Green Sep Basic, 3*15 cm; mobile phase, CO₂ (70%) and IPA (0.5% 2M NH₃—MeOH) (30%); Detector, UV 254 nm; product was obtained. This resulted in 870 mg (57.89%) of 10 as a white solid. LC-MS: (ES, m/z): 351 [M+Na]+; 1H-NMR−: (300 MHz, DMSO-d₆) δ 11.28 (s, 1H), 7.56 (d, J=8.1 Hz, 1H), 5.86 (d, J=4.4 Hz, 1H), 5.65 (d, J=1.6 Hz, 1H), 5.56 (d, J=8.1 Hz, 1H), 4.17 (d, J=10.1 Hz, 1H), 4.10 (d, J=4.3 Hz, 1H), 4.00 (dd, J=10.1, 3.9 Hz, 1H), 3.87 (dt, J=4.1, 1.3 Hz, 1H), 3.72-3.49 (m, 8H), 2.08 (dd, J=7.1, 2.8 Hz, 1H), 2.05-1.96 (m, 1H).

### Preparation of 11

[0726] Into a 250 mL 3-necked round-bottom flask were added Molecularsieve and ACN (30.00 mL) at room temperature. The resulting mixture was stirred for 10 min at room temperature under argon atmosphere. Then to the stirred solution were added 3-[[bis(diisopropylamino)phosphanyl]oxy]propanenitrile (1058.46 mg, 3.512 mmol, 1.5 equiv) and DCI (359.12 mg, 3.043 mmol, 1.30 equiv). Then the dimethyl 10 (820.00 mg, 2.341 mmol, 1.00 equiv) in 30 mL ACN was added dropwise at room temperature under argon atmosphere. The resulting mixture was stirred for 1 h at room temperature under argon atmosphere. The resulting mixture was diluted with CH₂Cl₂ (60 mL). The combined organic layers were washed with water (3×40 mL) after filtration, dried over anhydrous MgSO4. After filtration, the filtrate was concentrated under reduced pressure. The residue was purified by Prep-TLC (0.5% TEA in PE/10% EtOH in EtOAc 1:9) to afford 11 (800 mg, 62.1%) as a colorless oil. LC-MS: (ES, m/z): 549 [M−H]⁻; 1H-NMR: (300 MHz, DMSO-d₆) δ 11.34 (s, 1H), 7.61 (dd, J=8.1, 1.7 Hz, 1H), 5.80 (dd, J=15.0, 1.8 Hz, 1H), 5.60 (d, J=8.1 Hz, 1H), 4.48-4.23 (m, 2H), 4.17-3.98 (m, 2H), 3.88-3.73 (m, 2H), 3.72-3.51 (m, 10H), 2.79 (q, J=5.9 Hz, 2H), 2.07 (dtt, J=17.9, 7.1, 3.2 Hz, 2H), 1.15 (ddd, J=6.3, 3.8, 2.1 Hz, 12H); ³¹P NMR (DMSO-d₆) δ 149.71, 149.35, 30.85, 30.75

### Example 45

[chemical structure]

[0727] Preparation of 2: (J. Chem. Soc., Perkin Trans. 1, 1992, 1943-1952) To a solution of 1 (150.0 g, 1.0 mol) in DMF (2.0 L) was added 2, 2-dimethoxypropane (312.0 g, 3.0 mol) and p-TsOH (1.7 g, 10.0 mmol), then the reaction mixture was stirred at r.t. for 4 h, after the reaction, the solvent was concentrated to give the crude products which was used directly to next step.

[0728] Preparation of 3: (J. Chem. Soc., Perkin Trans. 1, 1992, 1943-1952) To a solution of 2 (190.0 g, 1.0 mol) in pyridine (2.0 L) was added BzCl (560.0 g, 4.0 mol) then the reaction mixture was stirred at r.t. for 2 h, after the reaction, the reaction mixture was poured into the ice water, EA was added for extraction, and the organic phase was washed with brine, dried over Na₂SO₄ and concentrated to give the crude product which was purified by silica gel column (EA:PE=1:5 to 1:1) to give 3 (350.0 g, 87.9% yield), ESI-LCMS: m/z=421.2 [M+Na]⁺.

[0729] Preparation of 4: (J. Chem. Soc., Perkin Trans. 1, 1992, 1943-1952) to a solution of 3 (240.0 g, 815.5 mmol) in MeCN (3.0 L) was added N-(2-oxo-1H-pyrimidin-4-yl) benzamide (193.0 g, 897.0 mmol) and BSA (496.6 g, 2.4 mol). then the reaction mixture was stirred at 50° C. for 30 min, then the reaction mixture was cooled to 0° C., and the TMSOTf (271.5 g, 1.2 mol) was added into the mixture at 0° C., then the reaction mixture was stirred at 70° C. for 2 h, after the reaction, the solvent was concentrated to give an oil, then the oil was poured into the solution of NaHCO₃ maintaining the mixture was slightly alkaline, EA was added for extraction, and the organic phase was washed with brine, dried over Na₂SO₄ and concentrated to give the crude product which was purified by silica gel column (EA:PE=1:3 to 1:1) to give 4 (180.0 g, 44.9% yield). ESI-LCMS: m/z=491.2 [M+H]⁺; ¹H NMR (400 MHz, DMSO-d₆) δ 11.19 (s, 1H), 8.20 (d, J=7.6 Hz, 1H), 8.01-7.84 (m, 4H), 7.73-7.57 (m, 2H), 7.50 (dt, J=10.4, 7.7 Hz, 4H), 7.40 (d, J=7.4 Hz, 1H), 6.03 (d, J=9.4 Hz, 1H), 5.33 (dd, J=9.4, 7.3 Hz, 1H), 4.66 (dd, J=7.3, 5.3 Hz, 1H), 4.45-4.35 (m, 2H), 4.22 (dd, J=13.7, 2.5 Hz, 1H), 1.58 (s, 3H), 1.34 (s, 3H).

[0730] Preparation of 5: To a solution of 4 (78.0 g, 158.7 mmol) in pyridine (800.0 mL) was added a solution of NaOH (6.3 g, 158.7 mmol) in a mixture solvent of H₂O and MeOH (4:1, 2N), Then the reaction mixture was stirred at 0° C. for 20 min, LC-MS and TLC show that the raw material was disappeared, then the mixture was pour into a solution of NH₄Cl, EA was added for extraction, and the organic phase was washed with brine, dried over Na₂SO₄ and concentrated to give the crude product, which was purified by silica gel column (DCM:MeOH=30:1 to 10:1) to give 5 (56.0 g, 91.0% yield). ESI-LCMS: m/z=388.1 [M+H]⁺; ¹H NMR (400 MHz, DMSO-d₆) δ 11.29 (s, 1H), 8.16 (d, J=7.6 Hz, 1H), 8.08-7.99 (m, 2H), 7.67-7.60 (m, 1H), 7.53 (t, J=7.6 Hz, 2H), 7.35 (d, J=7.6 Hz, 1H), 5.63 (d, J=6.1 Hz, 1H), 5.51 (d, J=9.5 Hz, 1H), 4.35-4.13 (m, 3H), 3.78 (dt, J=9.6, 6.5 Hz, 1H), 3.19 (d, J=5.1 Hz, 1H), 1.53 (s, 3H), 1.32 (s, 3H).

[0731] Preparation of 6: To a solution of 5 (15.0 g, 38.7 mmol) in DCM (200.0 mL) was added Ag₂O (35.8 g, 154.8 mmol), CH₃I (54.6 g, 387.2 mmol) and NaI (1.1 g, 7.7 mmol), then the reaction mixture was stirred at r.t. overnight, after the reaction, filtrate was obtained through filtration, and the filtrate concentrated the solvent to obtain the product 6 (13.0 g, 75.2% yield). ESI-LCMS: m/z=402.30 [M+H]⁺; ¹H NMR (400 MHz, DMSO-d₆) δ 11.30 (s, 1H), 8.22 (s, 1H), 8.00 (d, J=7.6 Hz, 2H), 7.71-7.20 (m, 4H), 5.56 (d, J=9.3 Hz, 1H), 4.33 (t, J=6.1 Hz, 1H), 4.26 (dd, J=6.2, 2.1 Hz, 1H), 4.20 (d, J=13.5 Hz, 1H), 3.98 (dd, J=13.5, 2.5 Hz, 1H), 3.66 (dd, J=9.3, 6.6 Hz, 1H), 3.34 (s, 3H), 1.57 (s, 3H), 1.32 (s, 3H).

[0732] Preparation of 7: To a solution of 6 (12.0 g, 29.9 mmol) was added CH₃COOH (120.0 mL), then the mixture was stirred at r.t. for 2 h, LC-MS and TLC showed that the raw material was disappeared, then the solvent was concentrated to get the crude product 7 (10.0 g, 83.3% yield). ESI-LCMS: m/z=362.1 [M+H]⁺.

[0733] Preparation of 8: To a solution of 7 (10.0 g, 24.9 mmol) in dioxane: H₂O=3:1 (120.0 mL) was added NaIO₄ (8.8 g, 41.5 mmol), then the reaction mixture was stirred at r.t. for 2 h, LC-MS and TLC showed that the raw material was disappeared, then the reaction mixture was cooled to 0° C., and NaBH₄ (2.4 g, 41.5 mmol) was added into the mixture and stirred at 0° C. for 0.5 h, LC-MS and TLC showed that the raw material was disappeared, then NH₄Cl was added into the mixture to adjust pH to be slightly alkaline, and concentrated to give the crude product, which was purified by silica gel column (PE:EA=5:1 to 1:1) to give 8 (8.0 g, 79.5% yield). ESI-LCMS: m/z=364.1 [M+H]⁺; ¹H NMR (400 MHz, DMSO-d₆) δ 11.26 (s, 1H), 8.14 (d, J=7.5 Hz, 1H), 8.07-7.94 (m, 2H), 7.67-7.59 (m, 1H), 7.52 (t, J=7.6 Hz, 2H), 7.37 (s, 1H), 5.91 (d, J=6.0 Hz, 1H), 4.77 (t, J=5.6 Hz, 1H), 4.70 (t, J=5.1 Hz, 1H), 3.70 (ddd, J=11.5, 5.0, 2.5 Hz, 1H), 3.57-3.39 (m, 6H), 3.31 (s, 3H).

[0734] Preparation of 9: To a solution of 8 (4.0 g, 11.0 mmol) in pyridine (50.0 mL) was added DMTrCl (5.5 g, 16.5 mmol), then the reaction mixture was stirred at r.t. for 2 h, LC-MS showed that the raw material was 20.0% and The ratio of product to by-product was 3.5:1. then the solvent was concentrated to get residue which was purified by silica gel column to give the purified products and by-products was 5 g in total, then the product was purified by SFC to get 9 (3.0 g, 40.9% yield). ESI-LCMS: m/z=666.2 [M+H]⁺; ¹H NMR (400 MHz, DMSO-d₆) δ 11.33 (s, 1H), 8.20 (d, J=7.4 Hz, 1H), 8.04 (d, J=7.7 Hz, 2H), 7.64 (t, J=7.4 Hz, 1H), 7.53 (t, J=7.6 Hz, 2H), 7.40 (d, J=7.8 Hz, 3H), 7.36-7.18 (m, 7H), 6.89 (d, J=8.4 Hz, 4H), 5.96 (d, J=5.7 Hz, 1H), 4.79 (t, J=5.7 Hz, 1H), 3.73 (s, 6H), 3.66-3.46 (m, 4H), 3.37 (s, 3H), 3.16 (ddd, J=10.1, 7.1, 3.0 Hz, 1H), 3.04 (dt, J=10.9, 3.4 Hz, 1H), 2.08 (s, 1H).

[0735] Preparation of 10: To a solution of 9 (2.8 g, 4.2 mmol) in DCM (30.0 mL) was added CEP[N(iPr)₂]₂ (1.3 g, 4.2 mmol) and DCI (601.2 mg, 5.1 mmol). The mixture was stirred at r.t. for 1 h. LC-MS showed 9 was consumed completely. The solution was washed with a solution of NaHCO₃ twice and washed with brine and dried over Na₂SO₄. Then concentrated to give a residue which was purified by Flash-Prep-HPLC with the following conditions (IntelFlash-1): Column, C18 silica gel; mobile phase, CH₃CN/H₂O (0.5% NH₄HCO₃)=1/1 increasing to CH₃CN/H₂O (0.5% NH₄HCO₃)=1/0 within 20.0 min, the eluted product was collected at CH₃CN/H₂O (0.5% NH₄HCO₃)=90/10; Detector, UV 254 nm. This resulted in to give 10 (2.8 g, 76.8% yield). ESI-LCMS: m/z=866.2 [M+H]⁺; ¹H NMR (400 MHz, DMSO-d₆) δ 11.34 (s, 1H), 8.22 (d, J=7.4 Hz, 1H), 8.09-7.98 (m, 2H), 7.64 (t, J=7.4 Hz, 1H), 7.53 (t, J=7.6 Hz, 2H), 7.45 (d, J=7.3 Hz, 1H), 7.39 (d, J=7.5 Hz, 2H), 7.31 (t, J=7.6 Hz, 2H), 7.24 (t, J=9.1 Hz, 5H), 6.89 (d, J=8.8 Hz, 4H), 5.96 (d, J=6.1 Hz, 1H), 4.02-3.86 (m, 1H), 3.84-3.63 (m, 11H), 3.56 (dtq, J=13.3, 6.6, 3.5, 3.1 Hz, 3H), 3.37 (s, 2H), 3.16 (ddd, J=10.0, 6.8, 3.3 Hz, 1H), 3.04 (ddd, J=10.7, 5.5, 3.0 Hz, 1H), 2.75 (td, J=5.9, 2.3 Hz, 2H), 1.18-1.07 (m, 12H); ³¹P NMR (DMSO-d₆) δ 148.02 (d, J=12.0 Hz).

### Example 46

[chemical structure]

[chemical structure]

[0736] Preparation of 10: To the solution of 3 (200.0 g, 0.5 mol) in ACN (2000.0 mL) was added a solution of SnCl₄ in DCM (1000.0 mL) at 0° C. under N₂, and the reaction mixture was stirred at 0° C. for 4 h under N₂ atmosphere. Then the reaction solution was poured into saturated sodium bicarbonate solution, the resulting product was extracted with EA (3*500.0 mL). The combined organic layer was washed with water and brine, dried over Na₂SO₄, and concentrated to give the crude, which was purified by silica gel column (PE:EA=5:1 to 0:1) to give 10 (65.0 g, 31.4% yield) as a white solid. ESI-LCMS: m/z=412.0 [M+H]⁺; ¹H NMR (400 MHz, DMSO-d₆) δ 8.27 (s, 1H), 8.09 (s, 1H), 7.74-7.60 (m, 2H), 7.59-7.57 (m, 1H), 7.44-7.40 (m, 2H), 7.24 (s, 2H), 5.90 (d, J=9.6 Hz, 1H), 5.73 (dd, J=7.4 Hz, 1H), 4.63 (t, 1H), 4.50-4.30 (m, 2H), 4.21 (dd, J=13.6 Hz, 1H), 1.61 (s, 3H), 1.35 (s, 3H).

[0737] Preparation of 11: To a solution of 10 (40.0 g, 97.3 mmol) in DCM (500.0 mL) was added Et₃N (30.0 g, 297.0 mmol) and DMAP (1.2 g, 9.8 mmol) at r.t. The reaction mixture was replaced with N₂ over 3 times, then MMTrCl (45.0 g, 146.1 mmol) was added to the mixture. The reaction mixture was stirred at r.t. overnight. TLC and LC-MS showed that 10 was consumed, and the reaction mixture was added to an aqueous solution of NaHCO₃ in ice-water. Then extracted product with EA, washed the organic phase with brine, and dried the organic phase over Na₂SO₄, then concentrated to get 11 (66.5 g) as a crude, used next step directly.

[0738] Preparation of 12: To a solution of 11 (66.5 g, 97.3 mmol) in pyridine (600.0 mL) was added 2N NaOH (H₂O:MeOH=4:1) (200.0 mL) at r.t. Then the reaction mixture was stirred at 0° C. for 30 min, LC-MS and TLC showed that the raw material was disappeared, then the mixture was poured into a solution of NH₄Cl, EA was added for extraction, and the organic phase was washed with brine, dried over Na₂SO₄ and concentrated to give the crude product which was purified by silica gel column (EA:PE=1:5 to 1:1) to give 12 (50.0 g, 88.7% yield for two step). ESI-LCMS: m/z=580.4 [M+H]⁺; ¹H NMR (400 MHz, DMSO-d₆) δ 8.44 (s, 1H), 7.92 (s, 1H), 7.36-7.16 (m, 13H), 6.89-6.80 (m, 2H), 5.59 (d, J=6.0 Hz, 1H), 5.35 (d, J=9.6 Hz, 1H), 4.32-4.12 (m, 4H), 4.08-3.95 (m, 3H), 3.72 (s, 3H), 1.99 (s, 3H), 1.54 (s, 3H), 1.32 (s, 3H), 1.17 (t, J=7.1 Hz, 3H).

[0739] Preparation of 13: To a solution of 12 (46.0 g, 79.4 mmol) in CH₃I (200.0 mL) was added Ag₂O (36.6 g, 158.4 mmol) and NaI (6.0 g, 42.5 mmol), then the reaction mixture was stirred at r.t. for 4 h, then the reaction mixture was filtrated and concentrated the solvent to obtain the product 13 (46.0 g, 97.6% yield), used next step directly. ESI-LCMS: m/z=594.3 [M+H]⁺.

[0740] Preparation of 14: To a stirred solution of DCA (22.5 mL) in DCM (750.0 mL) was added 13 (46.0 g, 77.5 mmol) and Et₃Si (185.0 mL) at r.t. And the reaction mixture was stirred at r.t. for 12 h. The reaction solution was evaporated to dryness under reduced pressure to give a residue, which was slurry with a solution of NaHCO₃ (50.0 mL) to get 14 (19.0 g, 76% yield), which was used next step directly.

[0741] Preparation of 15: To a solution of 14 (16.0 g, 49.7 mmol) in pyridine (200.0 mL) was added BzCl (9.0 g, 64.7 mmol) at 0° C. Then the reaction mixture was stirred at r.t. for 2 h. LC-MS showed 6 was consumed completely, then the mixture was cooled to 0° C., and a solution of NaOH in MeOH and H₂O (2 N, 50.0 mL) was added into the reaction mixture, and the mixture was stirred for 1 h at 0° C., then the mixture was poured into a solution of NH₄Cl. The product was extracted with EA (300.0 mL) and the organic layer was washed with brine and dried over Na₂SO₄. Then the organic layer was concentrated to give a residue, which was purified by slurry with PE:EA (8:1, 900.0 mL) to get 15 (20.0 g, 95.0% yield). ESI-LCMS: m/z=426.2 [M+H]⁺; ¹H NMR (400 MHz, DMSO-d₆) δ 11.21 (s, 1H), 8.77-8.69 (m, 2H), 8.06 (d, J=7.6 Hz, 2H), 7.65 (t, J=7.4 Hz, 1H), 7.56 (t, J=7.6 Hz, 2H), 7.34-7.23 (m, 4H), 7.23-7.12 (m, 5H), 6.89-6.80 (m, 4H), 5.90 (d, J=7.9 Hz, 1H), 4.36-4.29 (m, 1H), 4.06 (t, J=8.8 Hz, 1H), 3.92 (dd, J=25.0, 6.9 Hz, OH), 3.72 (d, J=1.0 Hz, 7H), 3.59 (dt, J=10.4, 6.6 Hz, 1H), 3.24 (s, 3H), 2.97 (d, J=7.7 Hz, 1H), 2.76 (q, J=5.5 Hz, 2H), 1.14 (dd, J=9.2, 5.7 Hz, 12H).

[0742] Preparation of 16: To a mixture solution of HCOOH (180.0 mL) and H₂O (20.0 mL) was added 15 (19.0 g, 44.7 mmol). The reaction mixture was stirred at r.t. for 4 h. LC-MS showed 15 was consumed completely. Then the reaction mixture was concentrated to give a residue which was purified by slurry with MeOH (100.0 mL) to get 16 (16.0 g, 92.7% yield) as a white solid. ESI-LCMS: m/z=385.9 [M+H]⁺; ¹H NMR (400 MHz, DMSO-d₆) δ 11.21 (s, 1H), 8.77 (d, J=1.2 Hz, 2H), 8.09-8.02 (m, 2H), 7.70-7.61 (m, 1H), 7.56 (t, J=7.6 Hz, 2H), 5.56 (d, J=9.2 Hz, 1H), 5.21 (d, J=6.1 Hz, 1H), 4.94 (d, J=4.5 Hz, 1H), 4.18 (t, J=9.1 Hz, 1H), 4.09 (q, J=5.2 Hz, 1H), 3.88-3.71 (m, 4H), 3.21-3.14 (m, 6H).

[0743] Preparation of 17: To a solution of 16 (16.0 g, 41.4 mmol) in dioxane (200.0 mL) was added H₂O (32.0 mL), and NaIO₄ (9.7 g, 45.5 mmol), then the reaction mixture was stirred at r.t. for 1 h, LC-MS and TLC showed that the raw material was disappeared, then the reaction mixture was cooled to 0° C., and NaBH₄ (1.7 g, 45.5 mmol) was added into the mixture and stirred at 0° C. for 0.5 h, LC-MS and TLC showed that the intermediate state was disappeared, then the NH₄Cl was added into the mixture to adjust pH to be slightly alkaline, and concentrated at r.t. to give the crude product which was purified by silica gel column (DCM:MeOH=20:1 to 8:1) to give 17 (16.0 g, 99.5% yield). ESI-LCMS: m/z=388.0 [M+H]⁺; ¹H NMR (400 MHz, DMSO-d₆) δ 11.18 (s, 1H), 8.75 (s, 1H), 8.67 (s, 1H), 8.09-7.99 (m, 2H), 7.65 (t, J=7.4 Hz, 1H), 7.56 (t, J=7.6 Hz, 2H), 5.90 (d, J=7.6 Hz, 1H), 4.88 (t, J=5.7 Hz, 1H), 4.67 (t, J=5.5 Hz, 1H), 4.08-3.98 (m, 2H), 3.78 (ddd, J=12.1, 5.2, 3.1 Hz, 1H), 3.68-3.39 (m, 4H), 3.36 (s, OH), 3.20 (s, 3H), 1.99 (s, 1H), 1.17 (t, J=7.1 Hz, 1H).

[0744] Preparation of 18: To a solution of 17 (12.0 g, 31.0 mmol) in pyridine (50.0 mL) was added DMTrCl (11.5 g, 34.1 mmol), then the reaction mixture was stirred at r.t. for 2 h, LC-MS showed that the raw material was 15.0% remained and the ratio of product to by-product was 3.5:1. Then the reaction solution was poured into ice-water, and extracted with EA, wished with brine, dried over Na₂SO₄, filtered and concentrated to get residue which was purified by silica gel column to give the purified product and by-product were 13.0 g in total, then 4.0 g crude was purified by SFC to get 18 (3.3 g, 15.4% yield). ESI-LCMS: m/z=690.3 [M+H]⁺; ¹H NMR (400 MHz, DMSO-d₆) δ 11.21 (s, 1H), 8.75 (s, 1H), 8.69 (s, 1H), 8.10-8.03 (m, 2H), 7.70-7.61 (m, 1H), 7.56 (t, J=7.6 Hz, 2H), 7.35-7.12 (m, 9H), 6.90-6.80 (m, 4H), 5.94 (d, J=7.5 Hz, 1H), 4.88 (t, J=5.6 Hz, 1H), 4.36 (t, J=5.1 Hz, 1H), 4.11 (dt, J=7.4, 3.6 Hz, 1H), 3.82 (ddd, J=11.9, 5.1, 3.1 Hz, 1H), 3.72 (d, J=1.3 Hz, 7H), 3.64 (ddd, J=11.9, 6.2, 4.2 Hz, 1H), 3.45 (qd, J=7.0, 4.9 Hz, 2H), 3.24 (s, 3H), 3.09 (ddd, J=9.9, 6.4, 3.2 Hz, 1H), 2.97 (ddd, J=9.9, 5.7, 3.2 Hz, 1H), 1.23 (s, OH), 1.06 (t, J=7.0 Hz, 1H).

[0745] Preparation of 19: To a suspension of 18 (3.3 g, 4.8 mmol) in DCM (40.0 mL) was added DCI (0.5 g, 4.0 mmol) and CEP[N(iPr)₂]₂ (1.6 g, 5.3 mmol). The mixture was stirred at r.t. for 0.5 h. LC-MS showed 10 was consumed completely. The solution was washed with a solution of NaHCO₃ twice and washed with brine and dried over Na₂SO₄. Then concentrated to give a residue which was purified by Flash-Prep-HPLC with the following conditions (IntelFlash-1): Column, C18 silica gel; mobile phase, CH₃CN/H₂O (0.5% NH₄HCO₃)=1/1 increasing to CH₃CN/H₂O (0.5% NH₄HCO₃)=1/0 within 20 min, the eluted product was collected at CH₃CN/H₂O (0.5% NH₄HCO₃)=1/0; Detector, UV 254 nm. This resulted in to give 19 (3.0 g, 3.9 mmol, 81.2% yield) as a white solid. ESI-LCMS: m/z=765.3 [M+H]⁺; ¹H NMR (400 MHz, DMSO-d₆) δ 11.22 (s, 1H), 8.80-8.71 (m, 2H), 8.11-8.04 (m, 2H), 7.65 (t, J=7.3 Hz, 1H), 7.56 (t, J=7.5 Hz, 2H), 7.36-7.24 (m, 4H), 7.24-7.15 (m, 5H), 6.89-6.82 (m, 4H), 5.92 (d, J=7.7 Hz, 1H), 4.34 (dt, J=7.5, 3.5 Hz, 1H), 4.08 (ddd, J=10.7, 7.3, 2.7 Hz, 1H), 4.03-3.89 (m, 1H), 3.80-3.72 (m, 10H), 3.67-3.53 (m, 2H), 3.47 (dp, J=10.5, 3.4 Hz, 1H), 3.26 (s, 3H) 3.11 (ddd, J=10.3, 6.2, 3.5 Hz, 1H), 3.00 (q, J=6.6, 5.2 Hz, 1H), 2.77 (q, J=5.6 Hz, 2H), 2.08 (s, 1H), 1.15 (t, J=7.0 Hz, 12H); ³¹P NMR (162 MHz, DMSO-d₆) δ 148.30, 147.99.

### Example 47

[chemical structure]

[0746] Preparation of 19: To a solution of 8 (8.0 g, 22.0 mmol) in EtOH (50.0 mL) was added a solution of CH₃NH₂ (50.0 mL), then the reaction mixture was stirred at r.t. for 4 h, after the reaction, the solvent was concentrated to give the crude, which was added into a mixture solvent of EA (20.0 mL) and PE (10.0 mL), then the mixture was stirred for 30 min and filtered to get 19 (5.5 g, 96.5% yield), which was used directly to next step.

[0747] Preparation of 20: (J. Chem. Soc., Perkin Trans. 1, 1992, 1943-1952) To a solution of 19 (5.0 g, 19.3 mmol) in H₂O (50.0 mL) and AcOH (50.0 mL) was added NaNO₂ (65.0 g, 772.0 mmol), then the reaction mixture was stirred at r.t. for 2 h, after the reaction, the reaction mixture was concentrated to give the crude product which was purified by silica gel column (DCM:MeOH=20:1 to 6:1) and MPLC (ACN: H₂O=0:100 to 10:90) to give 20 (3.0 g, 59.6% yield). ESI-LCMS: m/z=261.2 (M+H)⁺; ¹H NMR (400 MHz, DMSO-d₆) δ 11.29 (s, 1H), 7.66 (d, J=8.0 Hz, 1H), 5.67 (dd, J=17.5, 7.6 Hz, 2H), 4.74 (d, J=36.0 Hz, 2H), 3.86-3.63 (m, 1H), 3.58-3.40 (m, 6H).

[0748] Preparation of 21: To a solution of 20 (3.0 g, 11.5 mmol) in pyridine (30.0 mL) was added DMTrCl (3.9 g, 11.5 mmol), then the reaction mixture was stirred at r.t. for 2 h, LC-MS showed that the raw material was 20.0% and The ratio of product to by-product was 3:1, then the mixture was poured into a solution of NaHCO₃ (100.0 mL), and extracted with EA (100.0 mL), washed with brine and dried over Na₂SO₄, filtered and concentrated to get residue, which was purified by silica gel column to give The purified products and by-products were 5.0 g in total, then the product was purified by SFC to give 21 (1.8 g). ESI-LCMS: m/z=561.2 [M+H]⁺; ¹H NMR (400 MHz, DMSO-d₆) δ 11.31 (s, 1H), 7.69 (d, J=8.1 Hz, 1H), 7.45-7.15 (m, 8H), 6.88 (d, J=8.5 Hz, 4H), 5.71 (d, J=6.8 Hz, 1H), 5.64 (d, J=8.0 Hz, 1H), 4.79 (t, J=5.5 Hz, 1H), 3.74 (s, 6H), 3.60 (s, 1H), 3.51 (d, J=5.5 Hz, 3H), 3.11 (d, J=6.7 Hz, 1H), 3.02 (d, J=7.0 Hz, 1H).

[0749] Preparation of 22: To a solution of 21 (1.8 g, 3.2 mmol) in DCM (20.0 mL) was added CEP[N(iPr)₂]₂ (1.0 g, 3.4 mmol) and DCI (321.0 mg, 2.7 mmol). The mixture was stirred at r.t. for 1 h. LC-MS showed 21 was consumed completely. The solution was washed with solution of NaHCO₃ twice and washed with brine and dried over Na₂SO₄. Then concentrated to give a residue, which was purified by Flash-Prep-HPLC with the following conditions (IntelFlash-1): Column, C18 silica gel; mobile phase, CH₃CN/H₂O (0.5% NH₄HCO₃)=1/1 increasing to CH₃CN/H₂O (0.5% NH₄HCO₃)=1/0 within 20.0 min, the eluted product was collected at CH₃CN/H₂O (0.5% NH₄HCO₃)=90/10; Detector, UV 254 nm. This resulted in to give 22 (2.0 g, 82% yield). ESI-LCMS: m/z=761.2 [M+H]⁺; ¹H NMR (400 MHz, DMSO-d₆) δ 11.35 (s, 1H), 7.73 (dd, J=8.0, 2.0 Hz, 1H), 7.39 (d, J=7.4 Hz, 2H), 7.35-7.18 (m, 7H), 6.94-6.82 (m, 4H), 5.81-5.74 (m, 1H), 5.67 (d, J=8.0 Hz, 1H), 4.11-3.85 (m, 1H), 3.82-3.67 (m, 11H), 3.67-3.50 (m, 5H), 3.17-3.09 (m, 1H), 3.09-3.01 (m, 1H), 2.74 (td, J=5.8, 2.9 Hz, 2H), 1.13 (dd, J=9.2, 6.7 Hz, 13H); ³¹P NMR (DMSO-d₆) δ 148.09 (d, J=41.8 Hz). Example 48

[chemical structure]

[chemical structure]

[0750] Preparation of 2 (J. Chem. Soc., Perkin Trans. 1, 1992, 1943-1952): To a solution of 1 (150.0 g, 999.1 mmol) in DMF (1000.0 mL) was added P-TsOH (1.7 g, 10.0 mmol), then 2,2-dimethoxy-propane (312.2 g, 3.0 mol) was added to the reaction mixture. The reaction mixture was stirred for 5 h at r.t. 90.0% 1 was consumed by TLC. Then NaHCO₃ (8.4 g, 99.9 mmol) was added to the reaction mixture, filtered out the solid after 30 min, and concentrated the organic phase by vacuum to obtain crude, which was purified by c.c. (PE:EA=1:1 to 0:1) to get compound 2 (115.0 g, 60.5% yield) as a white solid.

[0751] Preparation of 22: A solution of 2 (115.0 g, 604.6 mmol) in pyridine (600.0 mL) was cooled to 0° C., then Ac₂O (185.2 g, 1.81 mol) was added drop wise to the reaction mixture. The reaction was stirred for 2 h at r.t., and the raw material was consumed by TLC. The reaction solution was added into water, extracted product with EA. The organic phase was washed with brine, and dried the organic phase with Na₂SO₄, and concentrated to get 22 (150.0 g, 90.4% yield), which was used for next step directly. ¹H NMR (400 MHz, Chloroform-d) δ 6.20 (d, J=3.4 Hz, 1H), 5.66 (d, J=6.8 Hz, 1H), 5.17 (t, J=6.9 Hz, 1H), 5.10 (dd, J=7.0, 3.4 Hz, 1H), 4.40-4.25 (m, 3H), 4.21 (dd, J=7.0, 6.1 Hz, 1H), 4.16-4.02 (m, 3H), 3.95 (dd, J=12.9, 4.4 Hz, 1H), 2.17 (s, 1H), 2.15-2.03 (m, 12H), 1.56 (d, J=4.0 Hz, 6H), 1.37 (d, J=3.1 Hz, 6H).

[0752] Preparation of 23: To a solution of 22 (150.0 g, 546.9 mmol) in ACN (2200.0 mL) was added 6-chloroguanine (139.1 g, 820.4 mmol) and BSA (333.7 g, 1.6 mol) at r.t., then the reaction mixture was replaced with N₂ over 3 times. The reaction was stirred for 30 min at 50° C. After that, the reaction mixture was cooled to 0° C. under N₂. Then TMSOTf (182.1 g, 820.4 mmol) was added into the mixture. After addition, the reaction was stirred for 1.5 h at 70° C. TLC and LC-MS showed the raw material was consumed. Concentrated the most organic solvent by vacuum, then the residual was added to an aqueous solution of NaHCO₃ in ice-water, extracted product with EA (4.0 L), dried the organic phase over Na₂SO₄, and filtered and concentrated to get crude, which was purified by c.c. (DCM to DCM:EA=5:1) to get compound 23 (82.0 g, 35.0% yield) as a white solid. ESI-LCMS: m/z=384.8 [M+H]⁺; ¹H NMR (400 MHz, DMSO-d₆) δ 8.23 (s, 1H), 7.04 (d, J=22.3 Hz, 2H), 5.57 (d, J=9.6 Hz, 1H), 5.40 (dd, J=9.6, 7.3 Hz, 1H), 4.48 (dd, J=7.4, 5.4 Hz, 1H), 4.40-4.30 (m, 2H), 4.11 (dd, J=13.6, 2.4 Hz, 1H), 1.81 (s, 3H), 1.55 (s, 3H), 1.34 (s, 3H).

[0753] Preparation of 24: To a solution of 23 (82.0 g, 192.3 mmol) in DCM (1000.0 mL) was added Et₃N (59.4 g, 576.9 mmol) and DMAP (2.4 g, 19.2 mmol) at r.t. The reaction mixture was replaced with N₂ over 3 times, then MMTrCl (90.9 g, 288.4 mmol) was added into the mixture. The reaction mixture was stirred at r.t. overnight. TLC and LC-MS showed that 92.0% raw material was consumed, and the reaction mixture was added to an aqueous solution of NaHCO₃ in ice-water, then extracted product with EA. Washed the organic phase with brine, and dried the organic phase over Na₂SO₄, then concentrated to get crude, which was purified by c.c. (DCM) to give compound 24 (110.0 g, 86.4% yield) as a white solid. ESI-LCMS: m/z=657.1 [M+H]⁺; ¹H NMR (400 MHz, DMSO-d₆) δ 8.21 (s, 1H), 7.37-7.31 (m, 4H), 7.29-7.23 (m, 6H), 7.20-7.15 (m, 2H), 6.86-6.80 (m, 2H), 5.75 (s, 1H), 5.23 (dd, J=9.6, 7.2 Hz, 1H), 4.85 (s, 1H), 4.44-4.16 (m, 3H), 3.71 (s, 4H), 1.70 (s, 3H), 1.49 (s, 3H), 1.31 (s, 3H).

[0754] Preparation of 25: To a solution of 24 (110.0 g, 164.3 mmol) in a mixed solvent of THF (500.0 mL) and MeOH (160.0 mL) was added NH₄OH (330.0 mL). The reaction mixture was stirred overnight at r.t., and the raw material was consumed by TLC and LC-MS. The reaction liquid was added into water, extracted product with EA. Washed the organic phase with brine, then dried the organic phase over Na₂SO₄, then concentrated to get the crude, which was purified by c.c. (PE:EA=10:1-1:2) to give compound 25 (98.0 g, 94.2% yield) as a white solid. ESI-LCMS: m/z=615.1 [M+H]⁺; ¹H NMR (400 MHz, DMSO-d₆) δ 8.32 (s, 1H), 7.36 (dt, J=8.2, 1.4 Hz, 4H), 7.31-7.21 (m, 6H), 7.15 (t, J=7.2 Hz, 2H), 6.85-6.76 (m, 2H), 5.57 (d, J=4.6 Hz, 1H), 4.69 (s, 1H), 4.25 (dt, J=5.1, 2.4 Hz, 1H), 4.03 (q, J=7.1 Hz, 4H), 3.70 (s, 3H), 3.62-3.44 (m, 1H), 1.51 (s, 3H), 1.31 (s, 3H).

[0755] Preparation of 26 (Ref WO2011/95576, 2011, A1): To a solution of 25 (70.0 g, 114.0 mmol) in CH₃I (350.0 mL) was added Ag₂O (79.2 g, 342.0 mmol) at r.t. Then the reaction mixture was stirred for 4 h at r.t. TLC and LC-MS showed that the raw material was consumed. Filtered out the residue with diatomite, and concentrated the filtrate by vacuum to get crude, which was purified by c.c. (PE:EA=10:1-1:1) to get compound 26 (28.0 g, 31.3% yield) as a white solid. ESI-LCMS: m/z=629.1 [M+H]⁺.

[0756] Preparation of 27: A solution of 3-hydroxy-propionitrile (15.6 g, 219.7 mmol) in THF (200.0 mL) was cooled to 0° C. The reaction mixture was replaced by N₂ over 3 times. Then NaH (12.4 g, 310.0 mmol, 60.0%) was added to the reaction mixture in turn. The reaction was stirred for 30 min at r.t., and then the reaction was cooled to 0° C. again. A solution of 26 (26.0 g, 33.0 mmol) in THF (150.0 mL) was added drop wise to the reaction mixture. Then the reaction mixture was stirred at r.t. overnight. TLC and LC-MS showed the raw material was consumed. The reaction liquid was added into water, extracted product with EA. The organic phase was washed with brine, and dried over Na₂SO₄, then concentrated to get the crude, which was purified by c.c. (DCM:MeOH=50:1-30:1) to get compound 27 (18.0 g, 88.0% yield) as white solid. ESI-LCMS: m/z=610.7 [M+H]⁺; ¹H NMR (400 MHz, DMSO-d₆) δ 10.68 (s, 1H), 7.90 (s, 1H), 7.69 (s, 1H), 7.34-7.15 (m, 12H), 6.92-6.81 (m, 2H), 4.46 (d, J=9.5 Hz, 1H), 4.22 (dt, J=5.5, 2.5 Hz, 1H), 4.07 (t, J=6.4 Hz, 1H), 3.84 (dd, J=13.5, 2.1 Hz, 1H), 3.64-3.54 (m, 1H), 3.36 (dd, J=13.3, 2.8 Hz, 1H), 3.08 (s, 3H), 2.59 (t, J=6.0 Hz, 3H), 1.49 (s, 3H), 1.30 (s, 3H).

[0757] Preparation of 28 (Beigelman, Leonid; Deval, Jerome; Jin, Zhinan WO2014/209979, 2014, A1): To a solution of 27 (18.0 g, 29.5 mmol) in DCM (300.0 mL) was added triethylsilane (70.0 mL) and DCA (10.0 mL) at r.t. Then the reaction mixture was stirred for 6 h at r.t., TLC and LC-MS showed that the raw material was consumed. Concentrated the almost organic solvent by vacuum, then PE (600.0 mL) was added to the reaction mixture. Filtered of the organic phase to get the solid, which was purified by MPLC (MeCN: H₂O=40:60 to 50:50) to get compound 28 (7.5 g, 75.0% yield) as a white solid. ESI-LCMS: m/z=338.3 [M+H]⁺; ¹H NMR (400 MHz, DMSO-d₆) δ 10.70 (s, 1H), 8.03 (s, 1H), 6.49 (s, 2H), 5.15 (d, J=9.6 Hz, 1H), 4.28 (d, J=5.1 Hz, 2H), 4.20 (d, J=13.6 Hz, 1H), 3.93 (ddd, J=13.3, 10.6, 3.7 Hz, 2H), 3.26 (s, 3H), 1.59 (s, 3H), 1.33 (s, 3H);

[0758] Preparation of 29: A solution of 28 (7.0 g, 20.6 mmol) in Pyr (150.0 mL) was cooled to 0° C. Then the reaction mixture was added i-BuCl (6.6 g, 61.8 mmol) drop wise. The reaction mixture was stirred for 30 min, TLC and LC-MS showed the raw material was consumed. The reaction liquid was added to ice-water, extracted product with EA. The organic phase was washed with brine, and dried over Na₂SO₄, and filtered and concentrated to get the crude, which was purified by c.c. (DCM:MeOH=100:1-30:1) to get compound 29 (5.8 g, 68.6% yield) as a white solid. ESI-LCMS: m/z=409.4 [M+H]⁺; ¹H NMR (400 MHz, DMSO-d₆) δ 12.13 (s, 1H), 11.66 (s, 1H), 8.39 (s, 1H), 5.24 (d, J=9.6 Hz, 1H), 4.36-4.23 (m, 3H), 3.99-3.88 (m, 2H), 3.27 (s, 4H), 2.78 (hept, J=6.8 Hz, 1H), 1.61 (s, 3H), 1.35 (s, 3H), 1.12 (d, J=6.8 Hz, 6H).

[0759] Preparation of 30: A solution of 29 (5.8 g, 14.1 mmol) was added into a mixed solvent of HCOOH (54.0 mL) and H₂O (6.0 mL) at r.t. Then reaction mixture was stirred for 1 h at r.t. TLC and LC-MS showed the raw material was consumed. Concentrated the reaction solution by vacuum at r.t. to get compound 30 (5.2 g, 14.0 mmol, 98.0% yield), which was used for next step directly. ESI-LCMS: m/z=368.4 [M+H]⁺; ¹H NMR (400 MHz, DMSO-d₆) δ 12.13 (s, 1H), 11.72 (s, 1H), 8.30 (s, 1H), 8.14 (s, 2H), 5.19 (d, J=9.2 Hz, 1H), 3.93 (t, J=9.2 Hz, 1H), 3.85 (dd, J=12.4, 1.9 Hz, 1H), 3.77 (d, J=3.7 Hz, 1H), 3.69-3.62 (m, 2H), 3.20 (s, 3H), 2.79 (h, J=6.8 Hz, 1H), 1.13 (dd, J=6.9, 1.2 Hz, 6H).

[0760] Preparation of 31: To a solution of 30 (5.2 g, 14.0 mmol) in dioxane (90.0 mL) and H₂O (30.0 mL) was added NaIO₄ (3.7 g, 15.4 mmol) at r.t. The reaction mixture was stirred for 3 h at r.t. LC-MS showed the raw material was consumed, and the reaction solution was cooled to 0° C. Then NaBH₄ (970.0 mg, 25.2 mmol) was added to the reaction mixture, and the raw material was consumed after 3 h by LC-MS. The reaction liquid was quenched with ammonium chloride, and adjusted the pH to 6-7 with 1N HCl, the mixture solution was concentrated to get the crude, which was purified by c.c. (DCM:MeOH=100:1-30:1) to get compound 31 (4.0 g, 68.6% yield) as a white solid. ESI-LCMS: m/z=370.4 [M+H]⁺; ¹H NMR (400 MHz, DMSO-d₆) δ 11.91 (d, J=151.0 Hz, 2H), 8.62-8.51 (m, 1H), 8.18 (s, 1H), 7.44-7.33 (m, 1H), 5.62 (d, J=7.9 Hz, 1H), 4.84 (t, J=5.7 Hz, 1H), 4.65 (d, J=5.2 Hz, 1H), 3.84 (dd, J=7.7, 3.5 Hz, 1H), 3.76 (ddd, J=12.1, 4.7, 2.7 Hz, 1H), 3.60 (ddd, J=12.0, 5.8, 3.6 Hz, 1H), 3.46 (d, J=8.8 Hz, 2H), 3.16 (s, 3H), 2.77 (h, J=6.8 Hz, 1H), 1.12 (dd, J=6.8, 2.4 Hz, 6H);

[0761] Preparation of 32: A solution of 31 (4.0 g, 6.4 mmol) was dissolved in pyridine (100.0 mL), and the reaction mixture was replaced by N₂ over 3 times, and then DMTrCl (5.1 g, 8.9 mmol) was added to the reaction mixture at r.t. Then the reaction was stirred for 30 min, TLC and LC-MS showed raw material was consumed. The reaction liquid was added into ice-water, and extracted product with EA. The organic phase was washed with brine, and dried the organic phase over Na₂SO₄, and concentrated to get crude, which was purified by c.c. (DCM:MeOH=100:1-30:1) and SFC to get compound 32 (2.7 g, 37.1% yield) as a white solid. ESI-LCMS: m/z=672.7 [M+H]⁺; ¹H NMR (400 MHz, DMSO-d₆) δ 11.50 (s, 2H), 8.22 (s, 1H), 7.32-7.24 (m, 4H), 7.22-7.12 (m, 5H), 6.84 (dd, J=9.0, 2.4 Hz, 4H), 5.63 (d, J=7.9 Hz, 1H), 4.85 (t, J=5.6 Hz, 1H), 3.95 (dt, J=7.4, 3.3 Hz, 1H), 3.85-3.77 (m, 1H), 3.73 (s, 7H), 3.65-3.57 (m, 1H), 3.43 (ddt, J=9.9, 6.9, 3.4 Hz, 1H), 3.05 (ddd, J=10.0, 6.2, 3.3 Hz, 1H), 2.96 (ddd, J=10.0, 5.6, 3.4 Hz, 1H), 2.78 (p, J=6.8 Hz, 1H), 1.11 (d, J=6.7 Hz, 6H).

[0762] Preparation of 33: To a solution of 32 (2.7 g, 2.4 mmol) in DCM (35.0 mL) was added DCI (390.0 mg, 2.0 mmol) at r.t. Then CEP[N(iPr)₂]₂ (1.2 g, 2.5 mmol) was added to the reaction mixture, then reaction mixture was stirred for 30 min at r.t. LC-MS showed raw material was consumed. The reaction liquid was added to an aqueous solution of NaHCO₃ into ice-water, and extracted product with DCM, washed the organic phase with brine, and dried the organic phase over Na₂SO₄, then filtered and concentrated to give a residue, which was purified by Flash-Prep-HPLC with the following conditions (IntelFlash-1): Column, C18 silica gel; mobile phase, CH₃CN/H₂O (0.5% NH₄HCO₃)=1/1 increasing to CH₃CN/H₂O (0.5% NH₄HCO₃)=1/0 within 20.0 min, the eluted product was collected at CH₃CN/H₂O (0.5% NH₄HCO₃)=100/0; Detector, UV 254 nm. This resulted in to give compound 33 (2.0 g, 56.4% yield) as a white solid. ESI-LCMS: m/z=872.3 [M+H]⁺; ¹H NMR (400 MHz, DMSO-d₆) δ 11.79 (s, 2H), 8.23 (d, J=1.7 Hz, 1H), 7.35-7.07 (m, 9H), 6.92-6.75 (m, 4H), 5.52 (d, J=8.0 Hz, 1H), 4.21 (s, 1H), 4.10-3.99 (m, 1H), 3.84-3.65 (m, 10H), 3.63-3.52 (m, 2H), 3.45 (ddd, J=10.2, 6.7, 3.6 Hz, 1H), 3.34 (s, 1H), 3.22 (s, 3H), 3.07 (ddd, J=10.2, 6.4, 3.4 Hz, 1H), 2.97 (ddd, J=10.0, 5.6, 3.5 Hz, 1H), 2.78 (dt, J=12.2, 6.4 Hz, 3H), 1.20-1.05 (m, 18H), ³¹P NMR (162 MHz, DMSO-d₆) δ 148.20, 147.13.

### Example 49

[chemical structure]

[chemical structure]

### Example 50

[chemical structure]

[0763] Preparation of 2: To a solution of 1-bromonaphthalene (5.2 g, 25.0 mmol) in dry THF (100.0 mL) was added n-BuLi (13.5 mL, 21.7 mmol, 1.6 M) drop wise at −78° C., then the mixture was stirred at −78° C. for 0.5 h, after that, a solution of 1 (5.5 g, 16.7 mmol) in THF (20.0 mL) was added into the mixture drop wise maintaining inner temperature below −70° C., then the reaction mixture was stirred for 1 h at −70° C. LC-MS showed 1 was consumed completely, the reaction was quenched with saturated ammonium chloride solution (80.0 mL) and extracted with EA, The organic layer was washed with brine, dried over Na₂SO₄, and concentrated under reduced pressure to give a residue, which was purified by Flash-Prep-HPLC with the following conditions (IntelFlash-1): Column, C18 silica gel; mobile phase, CH₃CN/H₂O (0.5% NH₄HCO₃)=2/3 increasing to CH₃CN/H₂O (0.5% NH₄HCO₃)=4/1 within 25 min, the eluted product was collected at CH₃CN/H₂O (0.5% NH₄HCO₃)=3/2; Detector, UV 254 nm. This resulted in to give 2 (5.8 g, 76.3% yield) as a white solid. ESI-LCMS: m/z 441 [M−OH]⁻.

[0764] Preparation of 3: To the solution of 2 (5.8 g, 12.6 mmol) in DCM (100.0 mL) was added TES (1.7 g, 14.7 mmol) at −78° C., BF₃·Et₂O (2.7 g, 18.9 mmol) was added into the mixture drop-wise at −78° C. The mixture was stirred at −40° C. for 1 h. LC-MS showed 2 was consumed completely, the solution was added into a saturated sodium bicarbonate solution (50.0 mL) and extracted with DCM. The organic layer was washed with brine, dried over Na₂SO₄, and concentrated under reduced pressure to give a residue, which was purified by Flash-Prep-HPLC with the following conditions (IntelFlash-1): Column, C18 silica gel; mobile phase, CH₃CN/H₂O (0.5% NH₄HCO₃)=2/3 increasing to CH₃CN/H₂O (0.5% NH₄HCO₃)=4/1 within 25 min, the eluted product was collected at CH₃CN/H₂O (0.5% NH₄HCO₃)=7/3; Detector, UV 254 nm. This resulted in to give 3 (2.7 g, 48.2%) as a white solid. ESI-LCMS: m/z 460 [M+H₂O]⁺; ¹H-NMR (600 MHz, CDCl₃): δ 8.01-8.00 (d, J=6.5 Hz, 1H), 7.88-7.87 (d, J=7.6 Hz, 2H), 7.77-7.76 (d, J=8.2 Hz, 1H), 7.56-7.49 (m, 2H), 7.38-7.23 (m, 11H), 6.98-5.94 (d, J=26.9 Hz, 1H), 5.09-4.99 (dd, J=61.1 Hz, 1H), 4.71-4.69 (d, J=11.6 Hz, 1H), 4.66-4.59 (m, 2H), 4.43-4.41 (d, J=11.6 Hz, 2H), 4.14-4.08 (m, 1H), 4.02-4.00 (dd, J=13.4 Hz, 1H), 3.81-3.78 (dd, J=14.8 Hz, 1H); ¹⁹F-NMR (CDCl₃): δ −193.24.

[0765] Preparation of 4: To a solution of 3 (2.7 g, 6.0 mmol) in dry DCM (40.0 mL) was added BCl₃ (36.0 mL, 36.0 mmol, 1 M) drop wise at −78° C., and the reaction mixture was stirred at −78° C. for 0.5 h. LC-MS showed 3 was consumed completely. After completion of reaction, the resulting mixture was quenched with MeOH (20.0 mL), then neutralized with sodium hydroxide solution (40.0 mL, 2 M). The mixture was extracted with DCM and concentrated to give a crude, the crude was dissolved in MeOH (30.0 mL) and added a sodium hydroxide solution (30.0 mL, 4 M), and the mixture was stirred at r.t. for 30 min. The mixture was extracted with EA, the organic layer was washed with brine, dried over Na₂SO₄, and concentrated under reduced pressure to give a residue, which was purified by silica gel column chromatography (DCM:MeOH=40:1˜15:1) to give 4 (1.3 g, 81.2%) as a white solid. ESI-LCMS: m/z 261 [M−H]⁻; ¹H-NMR (DMSO-d₆): δ 7.98-7.97 (d, J=10.2 Hz, 2H), 7.89-7.87 (m, 2H), 7.63-7.49 (m, 3H), 5.80-5.76 (d, J=26.3 Hz, 1H), 5.43 (s, 1H), 5.00 (s, 1H), 4.85-4.76 (d, J=58.4 Hz, 1H), 4.03-3.85 (m, 3H), 3.68-3.66 (m, 1H), 3.65-3.53 (m, 1H); ¹⁹F-NMR (DMSO-d₆): δ −192.76.

[0766] Preparation of 5: To a solution of 4 (1.3 g, 5.0 mmol) in pyridine (20.0 mL) was added DMTrCl (6.1 g, 16.0 mmol) at r.t. The reaction mixture was stirred at r.t. for 1 h. The LC-MS showed 4 was consumed and water (100.0 mL) was added. The product was extracted with EA and the organic layer was washed with brine and dried over Na₂SO₄, concentrated to give the crude, which was further purified by silica gel (EA:PE=1:30˜1:10) to give 5 (2.2 g, 78.5%) as a yellow solid. ESI-LCMS: m/z 563 [M−H]⁻; ¹H-NMR (600 MHz, DMSO-d₆): δ 8.03-7.99 (m, 2H), 7.91-7.86 (m, 2H), 7.64-7.57 (m, 2H), 7.49-7.48 (d, J=6.8 Hz, 2H), 7.40-7.24 (m, 8H), 6.89-6.88 (m, 4H), 5.92-5.88 (d, J=26.6 Hz, 1H), 5.50-5.49 (d, J=4.5 Hz, 1H), 4.96-4.87 (d, J=56.2 Hz, 1H), 4.18-4.14 (m, 2H), 3.74 (s, 6H), 3.42-3.40 (d, J=9.9 Hz, 1H), 3.33 (m, 2H); ¹⁹F-NMR (DMSO-d₆): δ −192.18.

[0767] Preparation of 6: To a suspension of 5 (2.2 g, 3.9 mmol) in DCM (20.0 mL) was added DCI (391.0 mg, 3.3 mmol) and CEP[N(iPr)₂]₂ (1.4 g, 4.7 mmol). The mixture was stirred at r.t. for 1 h. The LC-MS showed 5 was consumed completely. The solution was washed with a saturated sodium bicarbonate solution and brine successively, dried over Na₂SO₄, concentrated to give the crude, which was purified by Flash-Prep-HPLC with the following conditions (IntelFlash-1): Column, C18 silica gel; mobile phase, CH₃CN/H₂O (0.5% NH₄HCO₃)=1/1 increasing to CH₃CN/H₂O (0.5% NH₄HCO₃)=1/0 within 20 min, the eluted product was collected at CH₃CN/H₂O (0.5% NH₄HCO₃)=1/0; Detector, UV 254 nm. This resulted in to give 6 (2.5 g, 83.8%) as a white solid. ESI-LCMS: m/z 765 [M+H]⁺; ¹H-NMR (400 MHz, DMSO-d₆): δ 8.07-7.86 (m, 4H), 7.64-7.56 (m, 2H), 7.49-7.45 (m, 2H), 7.41-7.21 (m, 8H), 6.89-6.84 (m, 4H), 6.02-5.93 (m, 1H), 5.19-4.98 (m, 1H), 4.61-4.34 (m, 1H), 4.26-4.24 (m, 1H), 3.74-3.73 (m, 6H), 3.70-3.61 (m, 1H), 3.57-3.42 (m, 4H), 3.29-3.24 (m, 1H), 2.67-2.64 (m, 1H), 2.56-2.52 (m, 1H), 1.09-1.04 (m, 1H), 0.98-0.97 (d, J=6.7 Hz, 3H), 0.89-0.87 (d, J=6.7 Hz, 3H); ¹⁹F-NMR (DMSO-d₆): δ −191.75, −191.76, −191.84, −191.85; ³¹P-NMR (DMSO-d₆): δ 149.51, 149.47, 149.16, 149.14.

### Example 51

[chemical structure]

### Preparation of 9

[0768] To a solution of 8 (from Example 44) (6.6 g, 10.86 mmol, 85% purity, 1 eq) and DBU (3.31 g, 21.72 mmol, 3.27 mL, 2 eq) in DMF (70 mL) was added BOMCl (2.55 g, 16.29 mmol, 2.26 mL, 1.5 eq) at 0° C. The mixture was stirred at 20° C. for 12 h. The mixture was diluted with EtOAc (180 mL) and washed with H₂O (80 mL*3), and brine (80 mL), dried over Na₂SO₄, filtered and concentrated under reduced pressure to give a residue. The residue was purified by flash silica gel chromatography (ISCO®; 80 g SepaFlash® Silica Flash Column, Eluent of 10-60%, EtOAc/PE gradient @ 60 mL/min) to give 9 (5.2 g, 70% yield) as a white foam. LCMS (ESI): m/z 659.1; ¹H NMR (400 MHz, DMSO-d₆) δ=7.63 (d, J=8.3 Hz, 1H), 7.40-7.15 (m, 14H), 6.85 (t, J=8.0 Hz, 4H), 5.97 (s, 1H), 5.75 (d, J=8.0 Hz, 1H), 5.39-5.26 (m, 2H), 5.24 (d, J=2.0 Hz, 1H), 4.61 (s, 2H), 3.97 (s, 1H), 3.94-3.83 (m, 2H), 3.68 (d, J=10.0 Hz, 6H), 3.38 (s, 1H)

### Preparation of 10

[0769] To a solution of 9 (5.2 g, 8.17 mmol, 1 eq) and dimethoxyphosphorylmethyl trifluoromethanesulfonate (6.67 g, 24.50 mmol, 3 eq) in THF (50 mL) was added NaH (816.65 mg, 20.42 mmol, 60% purity, 2.5 eq) at −5° C. The mixture was stirred at 0° C. for 0.5 h. The reaction mixture was quenched by addition H₂O (50 mL) and diluted with EtOAc (100 mL), then washed with H₂O (50 mL), brine (50 mL), the organic layer was dried over Na₂SO₄, filtered and concentrated under reduced pressure. The residue was purified by flash silica gel chromatography (ISCO®; 80 g SepaFlash® Silica Flash Column, Eluent of 0-50%, EtOAc/DCM gradient @ 60 mL/min) to give 10 (4.2 g, 66.42% yield) as a white foam. LCMS (ESI): m/z 781.1 [M+Na]⁺, ¹H NMR (400 MHz, CDCl₃) δ=7.49-7.25 (m, 14H), 7.21-7.15 (m, 1H), 6.82 (d, J=8.8 Hz, 4H), 6.46 (s, 1H), 5.65 (d, J=8.2 Hz, 1H), 5.57-5.39 (m, 2H), 4.72 (s, 2H), 4.16-4.07 (m, 2H), 3.93 (dd, J=2.6, 10.8 Hz, 1H), 3.81-3.59 (m, 11H), 3.81-3.59 (m, 1H), 3.24 (dd, J=10.6, 13.5 Hz, 1H), 3.10 (dd, J=9.8, 13.3 Hz, 1H), 2.79 (d, J=2.2 Hz, 1H); ³¹P NMR (CD₃CN) δ=22.37 (s)

### Preparation of 11

[0770] To a solution of 10 (4.6 g, 6.06 mmol, 1 eq) and NaI (2.73 g, 18.19 mmol, 3 eq) in MeCN (15 mL) was added chloromethyl 2,2-dimethylpropanoate (3.65 g, 24.25 mmol, 3.51 mL, 4 eq). The mixture was stirred at 85° C. for 24 h. The reaction mixture was concentrated under reduced pressure to give a residue. The residue was purified by flash silica gel chromatography (ISCO®; 40 g SepaFlash® Silica Flash Column, Eluent of 0-50%, EtOAc/PE gradient @ 40 mL/min) to give 11 (2.7 g, 44.6% yield) as a pale yellow solid. LCMS (m/z): 981.1 [M+Na]⁺.

### Preparation of 12

[0771] To a solution of 11 (2.7 g, 2.82 mmol, 1 eq) in DCM (20 mL) was added Et₃SiH (645.45 mg, 2.82 mmol, 5 mL, 1 eq), followed by addition of TFA (1.54 g, 13.51 mmol, 1 mL, 4.80 eq). The mixture was stirred at 20° C. for 0.5 h. The reaction mixture was concentrated under reduced pressure to give a residue. The residue was purified by flash silica gel chromatography (ISCO®; 24 g SepaFlash® Silica Flash Column, Eluent of 0-50%, EtOAc/DCM gradient @ 30 mL/min) to give 12 (1.6 g, 84.82% yield) as a pale yellow solid. LCMS (ESI): m/z 679.1 [M+Na]⁺; ¹H NMR (400 MHz, CDCl₃) δ=7.44 (d, J=8.2 Hz, 1H), 7.38-7.26 (m, 5H), 5.76 (d, J=8.2 Hz, 1H), 5.69-5.62 (m, 4H), 5.51-5.43 (m, 1H), 5.51-5.43 (m, 1H), 4.70 (s, 2H), 4.30 (s, 1H), 4.26-4.06 (m, 4H), 3.90 (dd, J=4.9, 8.4 Hz, 2H), 3.22-3.06 (m, 1H), 1.22 (s, 18H): ³¹P NMR (162 MHz, CD₃CN) δ=20.25 (s, 1P).

### Preparation of 13

[0772] To a mixture of 12 (1.4 g, 2.13 mmol, 1 eq) in isopropanol (20 ml) and H₂O (2 mL) added Pd/C (1.4 g) and HCOOH (51.22 mg, 1.07 mmol, 2 mL) under N₂. The suspension was degassed under vacuum and purged with H₂ several times. The mixture was stirred under H₂ (15 PSI) at 15° C. for 5 h. The reaction mixture was filtered and the filtrate was concentrated to give a residue. The residue was purified by flash silica gel chromatography (ISCO®; 24 g SepaFlash® Silica Flash Column, Eluent of 0-50%, EtOAc/DCM gradient @ 30 mL/min) to give 13 (848 mg, 74.14% yield) as a white foam. LCMS (ESI): m/z 537.0 [M+H]⁺; ¹H NMR (400 MHz, CDCl₃) δ=10.01 (s, 1H), 7.53 (d, J=8.0 Hz, 1H), 5.78-5.63 (m, 6H), 4.40 (s, 1H), 4.35-4.22 (m, 3H), 4.11 (d, J=1.5 Hz, 1H), 3.88 (d, J=8.5 Hz, 2H), 1.22 (s, 18H); ³¹P NMR (162 MHz, CD₃CN) δ=20.17 (s, 1P.)

### Preparation of 14

[0773] To a solution of 13 (848 mg, 1.58 mmol, 1 eq) in DCM (10 mL) was added 3-bis(diisopropylamino)phosphanyloxypropanenitrile (571.73 mg, 1.90 mmol, 602.45 uL, 1.2 eq) at 0° C., followed by addition of 1H-imidazole-4,5-dicarbonitrile (186.7 mg, 1.58 mmol, 1 eq). The mixture was stirred at 15° C. for 1 h. The reaction mixture was quenched by addition of sat. aq. NaHCO₃ (10 mL) and diluted with DCM (20 mL). Then the organic layer was washed with sat. aq. NaHCO₃ (10 mL*2), dried over Na₂SO₄, filtered and concentrated under reduced pressure. The residue was purified by flash silica gel chromatography (ISCO®; 12 g SepaFlash® Silica Flash Column, Eluent of 0-50%, phase A: PE with 0.5% TEA; phase B: EA with 10% EtOH, 30 mL/min) to give 14 (720 mg, 61.21% yield) as a colorless oil. LCMS (ESI): m/z 737.1 [M+H]⁺; ¹H NMR (400 MHz, CD₃CN) δ=9.17 (s, 1H), 7.49 (d, J=8.0 Hz, 1H), 5.91-5.77 (m, 1H), 5.65-5.54 (m, 5H), 4.49-4.26 (m, 2H), 4.23-4.07 (m, 2H), 3.92-3.55 (m, 6H), 2.71-2.61 (m, 2H), 1.24-1.16 (m, 30H): ³¹P NMR (162 MHz, CD₃CN) δ=151.59.

### Example 52: Synthesis of 102

[chemical structure]

### Example 53: Synthesis of 103

[chemical structure]

### Example 54: Synthesis of 104

[chemical structure]

### Example 55: Synthesis of 105

[chemical structure]

### Example 56

[chemical structure]

[0774] Preparation of 2: A 2 L three-necked round bottom flask equipped with magnetic stirrer and thermometer was charged with 1 (60.0 g, 228.8 mmol) in dry DMF (600.0 mL) at r.t., imidazole (95.2 g, 1.3 mol) was added into the mixture reaction, then the reaction mixture was cooled down to turn 5° C., TBSCl (76.8 g, 499.3 mmol) was added into the mixture reaction, the reaction mixture was allowed to stir for 12 h at r.t. 1 was consumed by LCMS, then the reaction mixture was added in the saturated sodium bicarbonate solution (1.0 L), after quenching the reaction, the aqueous layer was extracted with EA (400.0 mL*2), the combined organic layer was washed with saturated brine and dried over anhydrous sodium sulfate, the organic layer was concentrated to get crude 2 (110.2 g, 212.8 mmol, 93.1% yield) as a white solid, the crude product was used directly for the next step without purification. ESI-LCMS: m/z=487.3 [M+H]⁺.

[0775] Preparation of 3: A 3 L three-necked round bottom flask equipped with magnetic stirrer and thermometer was charged with 2 (117.0 g, 225.9 mmol) in THF (550.0 mL) at r.t., water (275.0 mL) was added into the mixture reaction, then the reaction mixture was cooled down to turn 0° C. and add TFA (275.0 mL) by constant pressure funnel after 4 h, the reaction mixture was allowed to stir for 2 h at 0° C. 2 was consumed by TLC. Then, reaction mixture was added in a mixture solvent of ammonium hydroxide (250.0 mL) and water (800.0 mL) at 0° C., after quenching the reaction, the aqueous layer was extracted with EA (500.0 mL*2), the combined organic layer was washed with saturated brine and dried over anhydrous sodium sulfate, the organic layer was concentrated to get crude which was purified by silica gel column chromatography (PE:EA=10:1 to 0:1) to give compound 3 (51.1 g, 59.3% yield) as a white solid. ¹H-NMR (600 MHz, DMSO-d₆): δ=11.35 (s, 1H), 7.919 (d, J=6 Hz, 1H), 5.82 (s, 1H), 5.65 (d, J=6 Hz, 1H), 5.18 (s, 1H), 4.29 (s, 1H), 3.83 (s, 2H), 3.65 (d, J=12 Hz, 1H), 3.53 (d, J=6 Hz, 1H), 3.32 (d, J=6 Hz, 1H), 0.87 (s, 9H), 0.08 (s, 6H). ESI-LCMS: m/z=373.1 [M+H]⁺.

[0776] Preparation of 4: A 3 L three-necked round bottom flask equipped with magnetic stirrer and thermometer was charged with 3 (50.0 g, 131.5 mmol) in a mixture solvent of DCM (250.0 mL) and DMF (70.0 mL) at r.t., the mixture solution was cooled down to turn 5° C., PDC (63.1 g, 164.4 mmol) and 1-BuOH (200.0 mL) were added into the mixture reaction, keep the reaction at 5° C. and add Ac₂O (130.0 mL) by constant pressure funnel after 0.5 h, the reaction mixture was allowed to stir for 4 h at r.t. 3 was consumed by lc-ms, then the reaction mixture was added in the saturated sodium bicarbonate (400.0 mL), after quenching the reaction, the aqueous layer was extracted with DCM (500.0 mL*2), the combined organic layer was washed with saturated brine and dried over anhydrous sodium sulfate, the organic layer was concentrated to get crude which was purified by silica gel column chromatography (PE:EA=10:1 to 2:1) to give compound 4 (29.8 g, 50.6% yield) as a white solid. ¹H-NMR (DMSO d₆): δ=11.42 (s, 1H), 8.04 (d, J=6 Hz, 1H), 5.82 (s, 1H), 5.78 (d, J=6 Hz, 1H), 4.44 (s, 1H), 4.25 (s, 1H), 3.84 (s, 1H), 3.32 (s, 3H), 1.46 (s, 9H), 0.89 (s, 9H), 0.12 (s, 6H). ESI-LCMS: m/z=443.1 [M+H]⁺.

[0777] Preparation of 5: To a solution of 4 (33.0 g, 74.7 mmol) in dry THF (330.0 mL) was added CH₃OD (66.0 mL) and D₂O (33.0 mL) at r.t. Then the reaction mixture was added NaBD₄ (9.4 g, 224.0 mmol) three times per an hour at 50° C. The solution was stirred at 50° C. for 3 h. LCMS showed 4 was consumed. Water (300.0 mL) was added. The product was extracted with EA (2*300.0 mL). The organic layer was washed with brine and dry over by Na₂SO₄. Then the solution was concentrated under reduced pressure, crude was purified by by silica gel column chromatography (PE:EA=10:1 to 3:1) to give 5 (19.1 g, 68.5% yield) as a white solid. ¹H-NMR (600 MHz, DMSO d₆): δ=11.35 (s, 1H), 7.92-7.91 (d, J=6 Hz, 1H), 5.83-5.82 (d, J=6 Hz, 1H), 5.66-5.65 (d, J=6 Hz, 1H), 5.14 (s, 1H), 4.30-4.28 (m, 1H), 3.84-3.82 (m, 2H), 3.34 (s, 3H), 0.88 (s, 9H), 0.09 (s, 6H). ESI-LCMS: m/z 375 [M+H]⁺.

[0778] Preparation of 6: To a solution of 5 (19.1 g, 51.1 mmol) in dry ACN (190.0 mL) was added Et₃N (20.7 g, 204.6 mmol) at r.t. and TMSCl (11.1 g, 102.1 mmol) at 0° C. Then the reaction mixture was stirred at r.t. for 40 min. LCMS showed 5 was consumed and an intermediate was formed. Then the solution was added DMAP (12.5 g, 102.3 mmol), Et₃N (10.3 g, 102.1 mmol) and TPSCl (23.2 g, 76.6 mmol). The reaction mixture was stirred at r.t. for 15 h. LCMS showed the intermediate was consumed and conformed another intermediate. Then was added NH₄OH (200.0 mL) and stirred at r.t. for 24 h to give the mixture of product. The product was extracted with EA (2*200.0 mL). The organic layer was washed with brine and dry over by Na₂SO₄. Then the solution was concentrated under reduced pressure, crude was purified by Flash-Prep-HPLC with the following conditions (IntelFlash-1): Column, C18 silica gel; mobile phase, CH₃CN/H₂O=1/2 increasing to CH₃CN/H₂O=1/0 within 20 min, the eluted product was collected at CH₃CN/H₂O=1/0; Detector, UV 254 nm. This resulted in to give 6 (14.0 g, 73.7% yield). ¹H-NMR (DMSO-d₆): δ=7.89-7.88 (d, J=6 Hz, 1H), 7.20-7.18 (d, J=12 Hz, 2H), 5.85-5.84 (d, J=6 Hz, 1H), 5.73-5.72 (d, J=6 Hz, 1H), 5.09 (s, 1H), 4.24-4.23 (m, 1H), 3.81-3.80 (d, J=6 Hz, 1H), 3.69-3.68 (m, 1H), 3.36 (s, 3H), 0.87 (s, 9H), 0.07 (s, 6H). ESI-LCMS: m/z 374 [M+H]⁺.

[0779] Preparation of 7: To a solution of 6 (14.0 g, 37.5 mmol) in pyridine (140.0 mL) was added TMSCl (6.3 g, 58.0 mmol) at 0° C. and the mixture was stirred at r.t. for 1.5 h. LCMS showed 6 was consumed and an intermediate (a) was formed. Then was added BzCl (10.8 g, 76.8 mmol) at 0° C. and the mixture was stirred at r.t. for 1.5 h. LCMS showed the intermediate was consumed and another intermediate was formed. Then the mixture was added NH₄OH (30.0 mL) and was stirred at r.t. for 15 h. LCMS showed the intermediate was consumed. Water (300.0 mL) was added. The solution was extracted with EA (2*200.0 mL). The organic layer was washed with brine and dry over by Na₂SO₄. Then the solution was concentrated under reduced pressure, crude was purified by Flash-Prep-HPLC with the following conditions (IntelFlash-1): Column, C18 silica gel; mobile phase, CH₃CN/H₂O=1/1 increasing to CH₃CN/H₂O=1/0 within 20 min, the eluted product was collected at CH₃CN/H₂O=1/0; Detector, UV 254 nm. This resulted in to give 7 (10.5 g, 58.6% yield). ¹H-NMR (600 MHz, DMSO d₆): δ=11.29 (s, 1H), 8.53-8.52 (d, J=6 Hz, 1H), 8.01-8.00 (d, J=6 Hz, 2H), 7.63-7.61 (m, 1H), 7.52-7.50 (m, 2H), 7.36 (s, 1H), 5.88 (s, 1H), 5.24 (s, 1H), 4.28-4.26 (m, 1H), 3.91 (s, 1H), 3.81-3.79 (m, 1H), 3.46 (s, 3H), 0.87 (s, 9H), 0.08 (s, 6H). ESI-LCMS: m/z 478 [M+H]⁺.

[0780] Preparation of 8: To a solution of 7 (10.5 g, 22.0 mmol) in DMSO (105.0 mL) was added EDCI (12.7 g, 66.0 mmol), dry pyridine (1.7 g, 22.0 mmol) at r.t. and TFA (1.3 g, 11.0 mmol) at 0° C. Then the reaction mixture was stirred for 1 h. LCMS showed 7 was consumed. Water (100.0 mL) was added. The solution was extracted with EA (2*200.0 mL). The organic layer was washed with brine and dry over by Na₂SO₄. Then the solution was concentrated under reduced pressure to give the crude product 8 which was used in next step directly. ESI-LCMS: m/z 475 [M+H]⁺.

[0781] Preparation of 9: To a solution of 8 in dry THF (120.0 mL) and D₂O (40.0 mL) was added K₂CO₃ (12.2 g, 88.1 mmol) and 7a (16.8 g, 26.5 mmol) then the reaction mixture was stirred for 15 h at 35° C. under the N₂ atmosphere. LCMS showed 95% 7 was consumed. Water (60.0 mL) was added. The solution was extracted with EA (2*150.0 mL). The organic layer was washed with brine and dry over by Na₂SO₄. Then the solution was concentrated under reduced pressure, crude was purified by Flash-Prep-HPLC with the following conditions (IntelFlash-1): Column, C18 silica gel; mobile phase, CH₃CN/H₂O=1/1 increasing to CH₃CN/H₂O=1/0 within 20 min, the eluted product was collected at CH₃CN/H₂O=4/1; Detector, UV 254 nm. This resulted in to give 9 (9.3 g, 54.1% yield). ¹H-NMR (DMSO-d₆) δ=11.33 (s, 1H), 8.17-8.15 (d, J=12, 1H), 8.02-8.00 (d, J=12, 1H), 7.64-7.62 (m, 1H), 7.53-7.50 (m, 2H), 7.44-7.42 (d, J=12, 1H), 4.46-4.44 (d, J=12, 1H), 4.24-4.23 (d, J=6, 1H), 3.93-3.91 (d, J=12, 1H), 1.16 (s, 18H), 0.86 (s, 9H)), 0.08-0.06 (d, J=12, 6H). ESI-LCMS: m/z 782 [M+H]⁺; ³¹P-NMR (DMSO-d₆) δ=16.77, 16.00.

[0782] Preparation of 10:9 (9.3 g, 11.9 mmol) in the mixture solution of HOAc (140.0 mL) and H₂O (140.0 mL) was stirred at 30° C. for 15 h. LCMS showed 9 was consumed. The solution was added in the ice water and extracted with EA (2*300.0 mL). The organic layer was quenched to pH=6-7 and then washed with brine and dry over Na₂SO₄. Then the solution was concentrated under reduced, crude was purified by pressure Flash-Prep-HPLC with the following conditions (IntelFlash-1): Column, C18 silica gel; mobile phase, CH₃CN/H₂O=1/1 increasing to CH₃CN/H₂O=1/0 within 20 min, the eluted product was collected at CH₃CN/H₂O=2.5/1; Detector, UV 254 nm. This resulted in to give 10 (5.1 g, 64.6% yield). ¹H-NMR (DMSO-d₆) δ=9.09 (s, 1H), 7.92-7.85 (m, 3H), 7.60-7.48 (m, 4H), 6.02 (s, 1H), 5.71-5.64 (m, 4H), 4.53-4.51 (m, 1H), 3.94-3.70 (m, 5H), 3.31 (s, 1H), 1.21 (s, 18H). ³¹P-NMR (DMSO-d₆) δ=16.45. ESI-LCMS: m/z 668 [M+H]⁺.

[0783] Preparation of 11: To a suspension of 10 (4.6 g, 6.9 mmol) in DCM (45.0 mL) added CEOP[N(ipr)₂]₂ (2.5 g, 8.3 mmol), DCI (730.4 mg, 6.2 mmol). The mixture was stirred at r.t. for 1 h. LCMS showed 10 was consumed completely. The solution was quenched by water (40.0 mL), washed with brine (2*20.0 mL) and dry over by Na₂SO₄. Then the solution was concentrated under reduced pressure and the residue was purified by Flash-Prep-HPLC with the following conditions (IntelFlash-1): Column, C18 silica gel; mobile phase, CH₃CN/H₂O=1/1 increasing to CH₃CN/H₂O=1/0 within 20 min, the eluted product was collected at CH₃CN/H₂O=4/1; Detector, UV 254 nm. This resulted in to give 11 (4.7 g, 5.4 mmol, 78.3% yield) as a white solid. ¹H-NMR (600 MHz, DMSO-d₆) δ=11.34 (s, 1H), 8.18-8.16 (m, 1H), 8.02-8.01 (d, J=6, 2H), 7.65-7.42 (m, 4H), 5.95-5.93 (m, 1H), 5.66-5.61 (m, 4H), 4.64-4.57 (m, 1H), 4.32-4.31 (d, J=6, 1H), 4.12-4.10 (m, 1H), 3.81-3.45 (m, 7H), 2.81-2.79 (m, 2H), 1.16-1.13 (m, 30H). ³¹P-NMR (CDCl₃-d₆) δ=150.65, 150.20, 16.64, 15.41. ESI-LCMS: m/z 868 [M+H]⁺.

### Example 57

[chemical structure]

[chemical structure]

[0784] Preparation of 2: 1 (94.5 g, 317.9 mmol) was dissolved in dry DMF (1000 mL) under N₂ atmosphere. To the solution TBSCl (119.3 g, 794.7 mmol) and imidazole (75.8 g, 1.1 mol) was added at 25° C. and stirred for 17 hr. LCMS showed all of 1 consumed. The reaction mixture was washed with H₂O (3000*2 mL), EA (2000*2 mL) and brine (1500 mL). Dried over Na₂SO₄ and concentrated to give crude which goes to the next step. The reaction mixture was concentrated to give crude 2 (200 g, crude). ESI-LCMS: m/z 526 [M+H]⁺.

[0785] Preparation of 3: 2 (175.1 g, 333.0 mmol) was evaporated with pyridine and dried in vacuo for two times. The residue was dissolved in pyridine (1500 mL) under N₂. To the solution, i-BuCl (88.7 g, 832.6 mmol) was added at 5° C. under N₂ atmosphere and stirred for 3 hr. LCMS showed all of 2 consumed. The reaction mixture was washed with H₂O (3000*2 mL), EA (2000*2 mL) and brine (1500 mL). Dried over Na₂SO₄ and concentrated to give crude which goes to the next step. The reaction mixture was concentrated to give crude 3 (228 g, crude). ESI-LCMS: m/z 596 [M+H]⁺.

[0786] Preparation of 4: A solution of 3 (225 g, 377.6 mmol) was in THF (2000 mL) was added H₂O (500 mL) and TFA (500 mL) was added at 5° C. Then the reaction mixture was stirred at 5° C. for 1 hr. LCMS showed all of 3 consumed. Con NH₄OH (aq) was added to mixture to quench the reaction until the pH=7-8, then washed with H₂O (2000*2 mL), EA (2000*2 mL) and brine (1500 mL). Dried over Na₂SO₄ and concentrated to give crude which was purified by cc. The reaction mixture was concentrated to give 4 (155.6 g, 83.9% yield). ESI-LCMS: m/z 482 [M+H]⁺.

[0787] Preparation of 5: 4 (100 g, 207.6 mmol) was dissolved in dry DMF (1000 mL) under N₂. To the solution, t-BuOH (307.8 g, 4.2 mol), PDC (156.1 g, 0.4 mol) and Ac₂O (212.0 g, 2.1 mol) was added at 25° C. under N₂ atmosphere and stirred at 25° C. for 2 hr. LCMS and TLC showed all of 4 consumed. NaHCO₃(aq) was added to mixture to quench the reaction until the pH=7-8, then washed with H₂O (500*2 mL), EA (500*2 mL) and brine (500 mL). Dried over Na₂SO₄ and concentrated to give crude which was purified by cc. and MPLC. The reaction mixture was concentrated to give 5 (77.3 g, 61.6% yield). ESI-LCMS: m/z 552 [M−H]⁺.

[0788] Preparation of 6: 5 (40.0 g, 72.6 mmol) was dissolved in dry THF (400 mL) under N₂. To the solution, MeOD (80 mL) and D₂O (40 mL) was added at 25° C. under N₂ atmosphere, then NaBD₄ (9.1 g, 217.4 mmol) was added for three times and stirred for 15 hr. LCMS and TLC showed all of 5 consumed. The mixture was concentrated to give crude which goes to the next step. The reaction mixture was concentrated to give crude 6 (30 g, crude). ESI-LCMS: m/z 414 [M+H]⁺

[0789] Preparation of 7: 6 (30 g, crude) was evaporated with pyridine and dried in vacuo for two times. The residue was dissolved in dry pyridine (300 mL) under N₂. Then iBuCl (15.5 g, 145.3 mmol) was slowly added to the reaction mixture at 0° C. under N₂ atmosphere and stirred at 25° C. for 1 hr. LCMS and TLC showed all of 6 consumed. NaHCO₃(aq) was added to mixture to quench the reaction until the pH=7.5, then washed with H₂O (1500 mL), EA (1000*2 mL) and brine (1500 mL). Dried over Na₂SO₄ and concentrated to give crude residue R¹. NaOH (8 g, 0.2 mol), MeOH (80 mL) and H₂O (20 mL) made up NaOH (aq). The residue R¹ (40 g, 3.63 mmol) was dissolved in pyridine (20 mL). To the solution, 2N NaOH (aq) (100 ml) was added to the solution and stirred the reaction 15 min at 5° C. TLC showed all of R¹ consumed. The mixture was added NH₄Cl to pH=7-8 at 5° C., and concentrated to give crude which was purified by cc. The product was concentrated to give 7 (15.5 g, 33.00% yield over two steps). ESI-LCMS: m/z 484 [M+H]⁺.

[0790] Preparation of 8: To a stirred solution of 7 (15.5 g, 32.1 mmol) in DMSO (150 mL) were added EDCI (18.5 g, 96.3 mmol), pyridine (2.5 g, 32.1 mmol), TFA (1.8 g, 16.0 mmol) at room temperature under N₂ atmosphere. The reaction mixture was stirred for 1 h at room temperature. The reaction was quenched with water, extracted with EA (300.0 mL), washed with brine, dried over Na₂SO₄ and evaporated under reduced pressure give a crude 8 (17.3 g, crude) which was used directly to next step. ESI-LCMS: m/z=481 [M+H]⁺.

[0791] Preparation of 10: A solution of 8 (17.3 g, crude), 9 (21.4 g, 33.7 mmol) and K₂CO₃ (13.3 g, 96.3 mmol) in dry THF (204 mL) and D₂O (34 mL) was stirred 5 h at 40° C. The mixture was quenched with water, extracted with EA (600.0 mL), washed with brine, dried over Na₂SO₄ and evaporated under reduced pressure. The residue was purified by silica gel (PE:EA=5:1 ˜1:1) to give 10 (9.3 g, 36.6% yield over 2 steps) as a white solid. ESI-LCMS m/z=787 [M+H]⁺.

[0792] ¹H-NMR (DMSO-d₆): δ 11.24 (s, 1H, exchanged with D₂O), 8.74 (d, J=2.7 Hz, 2H), 8.05-8.04 (d, J=7.4 Hz, 2H), 7.65 (t, 1H), 7.57-7.54 (t, 2H), 6.20 (d, J=5.0 Hz, 1H), 5.64-5.58 (m, 4H), 4.77 (t, 1H), 4.70 (t, 1H), 4.57-4.56 (t, 1H), 3.35 (s, 3H), 1.09 (d, J=6.5 Hz, 18H), 0.93 (s, 9H), 0.15 (d, J=1.8 Hz, 6H); ³¹P NMR (DMSO-d₆): δ 17.05.

[0793] Preparation of 11: To a round-bottom flask was added 10 (9.3 g, 11.5 mmol) in a mixture of H₂O (93 mL) and HCOOH (93 mL). The reaction mixture was stirred for 5 h at 50° C. and 15 h at 35° C. The mixture was extracted with EA (500.0 mL), washed with water, NaHCO₃ solution and brine successively, dried over Na₂SO₄ and evaporated under reduced pressure. The residue was purified by Flash-Prep-HPLC with the following conditions (IntelFlash-1): Column, C18 silica gel; mobile phase, CH₃CN/H₂O (0.5% NH₄HCO₃)=1/2 increasing to CH₃CN/H₂O (0.5% NH₄HCO₃)=1/0 within 20 min, the eluted product was collected at CH₃CN/H₂O (0.5% NH₄HCO₃)=3/2; Detector, UV 254 nm. To give product 11 (6.3 g, 78% yield). ¹H-NMR (600 MHz, DMSO-d₆): δ 12.17 (s, 1H, exchanged with D₂O), 11.51 (s, 1H), 8.28 (s, 1H), 6.02-6.03 (d, J=4.2 Hz, 1H), 5.63-5.72 (m, 5H), 4.60 (s, 1H), 4.43-4.45 (m, 2H), 3.40 (s, 1H), 3.38 (s, 1H), 2.83-2.88 (m, 1H), 1.15-1.23 (m, 24H); ³¹P NMR (DMSO-d₆) δ=17.69. ESI-LCMS m/z=674 [M+H]⁺.

[0794] Preparation of 12: To a solution of 11 (5.6 g, 8.3 mmol) in DCM (55.0 mL) was added the DCI (835 mg, 7.1 mmol), then CEP[N(ipr)₂]₂ (3.3 g, 10.8 mmol) was added. The mixture was stirred at r.t. for 1 h. The reaction mixture was washed with H₂O (50.0 mL) and brine (50.0 mL), dried over Na₂SO₄ and evaporated under pressure. The residue was purified by Flash-Prep-HPLC with the following conditions (IntelFlash-1): Column, C18 silica gel; mobile phase, CH₃CN/H₂O (0.5% NH₄HCO₃)=1/1 increasing to CH₃CN/H₂O (0.5% NH₄HCO₃)=1/0 within 20 min, the eluted product was collected at CH₃CN/H₂O (0.5% NH₄HCO₃)=9/1; Detector, UV 254 nm. The product was concentrated to give 12 (6.3 g, 87% yield) as a white solid. ¹H-NMR (DMSO-d₆): δ 12.14 (s, 1H, exchanged with D₂O), 11.38 (s, 1H), 8.27-8.28 (d, J=6 Hz, 1H), 5.92-5.98 (m, 1H), 5.59-5.65 (m, 4H), 4.57-4.68 (m, 3H), 3.61-3.85 (m, 4H), 3.37 (s, 1H), 3.32 (s, 1H), 2.81-2.85 (m, 3H), 1.09-1.20 (m, 36H); ³¹P NMR (DMSO-d₆): δ 150.60, 149.97, 17.59, 17.16; ESI-LCMS m/z=874 [M+H]⁺.

### Example 58. Luciferase Reporter Assay in COS-7 Cells

[0795] All siNAs synthesized were tested for in vitro activity using a 3-point luciferase reporter assay and a subset of candidates were tested in a dose-response luciferase reporter assay.

[0796] In the psiCHECK™-2 reporter plasmid, Renilla luciferase is used as the primary reporter gene with the HSD17B13 gene (NM_178135.5) cloned downstream of its translational stop codon. A second reporter gene, firefly luciferase, is also expressed and used as a transfection control. COS-7 cells (ATCC, CRL-1651) were seeded into 96-well microplates and transfected with the reporter plasmid using Lipofectamine 3000 (Invitrogen, L3000001). The cells were then transfected with 10, 1, or 0.1 nM siNAs using Lipofectamine RNAiMAX

[0797] (Invitrogen, 13778100). A mock, no-drug control, which consisted of transfecting 1× phosphate-buffered saline, was included. After 72 hours of siNA treatment, the Dual-Glo® Luciferase Assay System (Promega, E2940) was used according to the manufacturer's protocol to quantify firefly and Renilla luciferase activity. All luminescence was measured on an En Vision plate reader (Perkin Elmer). The Renilla: firefly luminescence ratio was calculated for each well. The ratios from siNA-treated wells were then normalized to ratios of the mock-treated wells and percentage inhibition was calculated. CellTiter-Glo® Luminescent Cell Viability Assays were run in parallel using similarly treated COS-7 cells. Assays were performed according to the manufacturer's protocol and luminescence was measured on an En Vision plate reader. The luminescence from siNA-treated wells were then normalized to luminescence of mock-treated wells and percentage viability was calculated.

[0798] A subset of siNA candidates were then tested in a dose-response luciferase reporter assay. Dose-response assays were similarly conducted, but instead with serial concentrations of siNAs starting at 10 nM (1:5 dilutions) for a total of nine concentrations tested for each siNA. Dose-response curves were fitted by nonlinear regression with variable slope and EC₅₀ values and maximum percentage inhibition were calculated. No siNAs exhibited significant cytotoxic effects in the COS-7 cells at the concentrations tested.

TABLE 1
Luciferase reporter assay in COS-7 - 3-point data

| ds-siNA | Luciferase reporter assay in COS-7 | | |
|---|---|---|---|
| NO. | % inhibition of reporter activity | | |
| (D#) | 50 nM | 5 nM | 0.5 nM |
| 1 | C | C | A |
| 2 | B | C | C |
| 3 | C | C | D |
| 4 | B | C | C |
| 5 | A | A | B |
| 6 | A | A | B |
| 7 | A | A | A |
| 8 | A | A | B |
| 9 | B | C | C |
| 10 | B | B | C |
| 11 | B | C | C |
| 12 | B | C | C |
| 13 | A | B | C |
| 14 | A | B | C |
| 15 | A | A | A |
| 16 | B | B | C |
| 17 | A | A | B |
| 18 | B | B | C |
| 19 | B | C | C |
| 20 | B | B | C |
| 21 | B | B | C |
| 22 | A | B | C |
| 23 | A | A | B |
| 24 | A | A | B |
| 25 | A | B | B |
| 26 | A | B | C |
| 27 | B | C | D |
| 28 | B | C | D |
| 29 | C | D | D |
| 30 | A | B | C |
| 31 | C | D | D |
| 32 | B | C | D |
| 33 | A | B | B |
| 34 | B | B | C |
| 35 | A | B | C |
| 36 | A | B | B |
| 37 | B | B | C |
| 38 | B | C | D |
| 39 | B | B | C |
| 40 | B | C | C |
| 41 | C | D | D |
| 42 | B | D | D |
| 43 | B | C | D |
| 44 | C | D | D |
| 45 | B | B | D |
| 46 | B | C | D |
| 47 | C | D | D |
| 48 | B | C | D |
| 49 | B | B | D |
| 50 | A | A | B |
| 51 | A | A | B |
| 52 | D | D | D |
| 53 | A | B | C |
| 54 | A | B | C |
| 55 | B | C | D |
| 56 | A | A | B |
| 57 | A | B | C |
| 58 | B | C | C |
| 59 | B | B | C |
| 60 | B | B | C |
| 61 | A | A | B |
| 62 | A | A | C |
| 63 | A | A | B |
| 64 | A | A | C |
| 65 | A | B | C |
| 66 | A | B | C |
| 67 | A | A | B |
| 68 | A | A | C |
| 69 | B | B | C |
| 70 | A | B | C |
| 71 | A | A | B |
| 72 | B | B | C |
| 73 | B | B | C |
| 74 | A | A | B |
| 75 | A | B | C |
| 76 | A | A | B |
| 77 | A | B | B |
| 78 | A | B | B |
| 79 | B | C | D |
| 80 | A | B | C |
| 81 | C | C | D |
| 82 | A | B | C |
| 83 | A | A | B |
| 84 | A | B | B |
| 85 | B | B | D |
| 86 | B | B | D |
| 87 | A | A | B |
| 88 | A | A | B |
| 89 | A | A | B |
| 90 | B | C | D |
| 91 | C | C | D |
| 92 | B | C | D |
| 93 | A | B | B |
| 94 | A | B | B |
| 95 | A | A | B |
| 96 | A | A | B |
| 97 | A | B | B |
| 98 | A | B | B |
| 99 | A | A | B |
| 100 | A | B | C |
| 101 | A | B | D |
| 102 | A | A | B |
| 103 | A | A | B |
| 104 | B | C | D |
| 105 | A | B | C |
| 106 | A | B | C |
| 107 | A | B | C |
| 108 | A | C | D |
| 109 | B | B | C |
| 110 | A | B | C |
| 111 | A | B | C |
| 112 | B | B | C |
| 113 | A | A | B |
| 114 | A | B | C |
| 115 | A | B | B |
| 116 | B | B | D |
| 117 | A | B | C |
| 118 | B | B | C |
| 119 | B | C | D |
| 120 | B | B | C |
| 121 | A | B | B |
| 122 | A | B | C |
| 123 | A | C | C |
| 124 | A | B | C |
| 125 | A | B | C |
| 126 | B | B | D |

A = ≥76%;
B = 51-75%;
C = 26-50%;
D = ≤25%

TABLE 2
CellTiter-Glo in COS-7 - 3-point data

| ds-siNA | CellTiter-Glo in COS-7 | | |
|---|---|---|---|
| NO. | % viability | | |
| (D#) | 50 nM | 5 nM | 0.5 nM |
| 1 | A | A | B |
| 2 | A | A | B |
| 3 | B | A | A |
| 4 | A | A | A |
| 5 | B | A | A |
| 6 | A | A | A |
| 7 | A | A | A |
| 8 | B | A | A |
| 9 | A | A | A |
| 10 | A | A | B |
| 11 | A | A | A |
| 12 | A | A | A |
| 13 | A | A | A |
| 14 | A | A | A |
| 15 | A | A | A |
| 16 | A | A | A |
| 17 | B | A | B |
| 18 | B | A | A |
| 19 | A | A | A |
| 20 | A | A | A |
| 21 | A | A | A |
| 22 | A | A | A |
| 23 | A | A | A |
| 24 | A | A | A |
| 25 | A | A | A |
| 26 | A | A | A |
| 27 | A | A | A |
| 28 | A | A | A |
| 29 | A | A | A |
| 30 | A | A | A |
| 31 | A | A | A |
| 32 | A | A | A |
| 33 | V | A | B |
| 34 | B | A | A |
| 35 | A | A | A |
| 36 | A | A | B |
| 37 | B | A | A |
| 38 | A | A | B |
| 39 | A | A | A |
| 40 | A | A | B |
| 41 | B | A | B |
| 42 | A | A | B |
| 43 | A | B | B |
| 44 | B | B | B |
| 45 | B | B | B |
| 46 | B | B | B |
| 47 | B | B | B |
| 48 | C | B | B |
| 49 | C | A | B |
| 50 | B | B | A |
| 51 | C | B | A |
| 52 | B | A | A |
| 53 | A | B | A |
| 54 | A | A | A |
| 55 | B | B | A |
| 56 | B | B | A |
| 57 | B | B | A |
| 58 | C | B | A |
| 59 | C | A | A |
| 60 | C | A | A |
| 61 | B | A | A |
| 62 | B | B | A |
| 63 | B | B | A |
| 64 | A | A | A |
| 65 | B | A | A |
| 66 | B | A | A |
| 67 | B | B | B |
| 68 | A | A | A |
| 69 | C | B | A |
| 70 | B | B | A |
| 71 | A | A | A |
| 72 | A | A | A |
| 73 | B | A | A |
| 74 | A | A | A |
| 75 | A | A | A |
| 76 | A | A | A |
| 77 | B | A | A |
| 78 | B | A | A |
| 79 | B | A | A |
| 80 | D | B | A |
| 81 | D | B | A |
| 82 | B | A | A |
| 83 | A | A | A |
| 84 | B | A | A |
| 85 | B | A | C |
| 86 | C | A | B |
| 87 | C | A | B |
| 88 | B | A | B |
| 89 | B | A | B |
| 90 | B | A | A |
| 91 | B | A | A |
| 92 | A | A | A |
| 93 | A | A | A |
| 94 | C | B | B |
| 95 | A | A | A |
| 96 | B | B | B |
| 97 | C | A | A |
| 98 | B | A | A |
| 99 | A | A | A |
| 100 | B | A | A |
| 101 | A | A | A |
| 102 | B | A | A |
| 103 | C | A | A |
| 104 | B | A | A |
| 105 | A | A | A |
| 106 | A | A | A |
| 107 | A | A | A |
| 108 | A | A | A |
| 109 | B | A | A |
| 110 | A | A | A |
| 111 | A | A | A |
| 112 | B | A | A |
| 113 | A | A | A |
| 114 | A | A | A |
| 115 | A | A | A |
| 116 | A | A | A |
| 117 | A | A | A |
| 118 | A | A | A |
| 119 | A | A | A |
| 120 | C | A | A |
| 121 | A | A | A |
| 122 | A | A | A |
| 123 | A | A | A |
| 124 | A | A | A |
| 125 | A | A | A |
| 126 | A | A | A |

A = ≥95%;
B = 85-94%;
C = 75-84%;
D = ≤74%

TABLE 3
Luciferase reporter assay in COS-7 - dose-response data

| | Luciferase reporter assay in COS-7 | | |
|---|---|---|---|
| | | Maximum % | CellTiter-Glo in |
| ds-siNA | | inhibition | COS-7 |
| NO. | EC₅₀ | of reporter | CC₅₀ |
| (D#) | (nM) | activity | (nM) |
| 5 | D | BB | >10 |
| 6 | D | BB | >10 |
| 7 | D | AA | >10 |
| 8 | D | CC | >10 |
| 14 | C | AA | >10 |
| 15 | D | BB | >10 |
| 17 | B | AA | >10 |
| 22 | A | CC | >10 |
| 23 | A | BB | >10 |
| 24 | C | BB | >10 |
| 25 | A | BB | >10 |
| 26 | C | BB | >10 |
| 33 | A | AA | >10 |
| 36 | B | BB | >10 |
| 50 | D | BB | >10 |
| 51 | D | BB | >10 |
| 56 | D | BB | >10 |
| 61 | C | BB | >10 |
| 62 | C | BB | >10 |
| 63 | D | BB | >10 |
| 64 | A | AA | >10 |
| 67 | D | BE | >10 |
| 68 | C | AA | >10 |
| 71 | C | CC | >10 |
| 74 | C | AA | >10 |
| 76 | C | BB | >10 |
| 77 | C | AA | >10 |
| 78 | C | BB | >10 |
| 83 | D | AA | >10 |
| 84 | D | BB | >10 |

A = ≥0.51;
B = 0.31-0.5;
C = 0.11-0.3;
D = ≤0.1
AA = ≥91%;
BB = 81-90%;
CC = 71-80%

### Example 59. siNA In Vivo Activity in AAV-HSD17813 Mouse Model

[0799] Methods. Certain siRNA molecules were selected for initial pharmacokinetic/pharmacodynamic studies in vivo. To enhance targeted delivery to hepatocytes, a GalNAc ligand was incorporated at the 3′ end of the sense strand via standard phosphoramidite chemistry. The specific GalNAc ligand used (“GalNAc4-ps-GalNAc4-ps GalNAc4” or “p-(ps)2-GalNAc4”), shown below, includes three monomeric “GalNAc4” derivative units linked through two phosphorothioate linkages, where one GalNAc4 unit is linked to the 3′ end nucleotide on the sense strand via a standard phosphodiester linkage.

[chemical structure]

### Structure of “GalNAc4 Phosphoramidite”

[chemical structure]

### Structure of “GalNAc4”

[chemical structure]

### Structure of “GalNAc4-ps-GalNAc4-ps GalNAc4” or “p-(ps)2-GalNAc4”

[0800] To evaluate certain HSD17B13 siRNA agents, an AAV-HSD17ß13 mouse model was used. Mice (n=4/group) were injected with an adeno-associated virus (AAV) expressing human HSD17ß13. Seven days after AAV injection, mice were subcutaneously administered a single dose (ranging from 1.5 to 5 mg/kg) of an siRNA. Seven to fourteen days after administration, human HSD17β13 expression in liver was determined by RTqPCR and western blot analysis after normalization against human HSD17β13 expression of control animals injected with PBS.

[0801] In a first study, a selection of siRNA duplexes were tested at 1.5 and/or 5 mpk, observing the HSD17B13 mRNA knockdown 7 days post dose. The results are shown in FIGS. 4-10 and 13 and Table 4.

TABLE 4
In Vivo Study

| | | | | | %RNA Inhibition | |
|---|---|---|---|---|---|---|
| mds- | SEQ | Sense Strand Base | | Antisense Strand Base | (Drug v. Vehicle) | |
| siNA | ID | Sequence + Modifications | SEQ ID | Sequence + Modifications | 1.5 | 5 |
| (MD#) | NO. | (5′-3′) | NO. | (5′-3′) | mg/kg | mg/kg |
| 88 | 403 | mUpsmUpsmGmGmGmAfAmA | 533 | vmUpsfUpsmUmGmAfU | 0 | 85.7 |
| | | fAfAfCmUmGmGmUmAmUm | | mAmCmCmAmGmUmUf | | |
| | | CmAmApsmA- | | UmUfUmCmCmCmAmA | | |
| | | GalNAc4psGalNAc4psGalNAc4 | | psmUpsmU | | |
| 157 | 576 | mCpsmUpsmUmGmGmAfGmU | 450 | vmApsfApsmCmUmUfCm | 66.8* | 82 |
| | | fCfGfUmUmGmGmUmGmAm | | AmCmCmAmAmCmGfA | | |
| | | AmGmUpsmU- | | mCfUmCmCmAmAmGps | | |
| | | GalNAc4psGalNAc4psGalNAc4 | | mUpsmU | | |
| 131 | 576 | mCpsmUpsmUmGmGmAfGmU | 604 | mApsfApsmCmUmUfCm | 48.3 | 85.5 |
| | | fCfGfUmUmGmGmUmGmAm | | AmCmCmAmAmCmGfA | | |
| | | AmGmUpsmU- | | mCfUmCmCmAmAmGps | | |
| | | GalNAc4psGalNAc4psGalNAc4 | | mUpsmU | | |
| 158 | 601 | mUpsmGpsmAmAmGmUfCmG | 501 | vmApsfUpsmCmAmGfA | 28.5 | 67.9 |
| | | fUfAfAmGmAmAmGmUmCm | | mCmUmUmCmUmUmAf | | |
| | | UmGmApsmU- | | CmGfAmCmUmUmCmA | | |
| | | GalNAc4psGalNAc4psGalNAc4 | | psmUpsmU | | |
| 86 | 401 | mUpsmApsmUmUmGmGfUmU | 531 | vmUpsfApsmAmUmAfU | 53.3* | 65.5 |
| | | fCfUfGmUmGmGmGmAmUm | | mCmCmCmAmCmAmGf | | |
| | | AmUmUpsmA- | | AmAfCmCmAmAmUmA | | |
| | | GalNAc4psGalNAc4psGalNAc4 | | psmUpsmU | | |
| 87 | 402 | mCpsmUpsmAmGmGmAfCmA | 532 | vmUpsfGpsmUmGmAfU | 74.8 | 76.3 |
| | | fUfUfUmUmUmGmGmAmUm | | mCmCmAmAmAmAmAf | | |
| | | CmAmCpsmA- | | UmGfUmCmCmUmAmG | | |
| | | GalNAc4psGalNAc4psGalNAc4 | | psmUpsmU | | |
| 159 | 602 | mUpsmUpsmGmGmUmGfAmA | 452 | vmApsfGpsmGmAmAfU | 61.8* | 91.7 |
| | | fGfUfUmUmUmUmCmAmUm | | mGmAmAmAmAmAmCf | | |
| | | UmCmCpsmU- | | UmUfCmAmCmCmAmA | | |
| | | GalNAc4psGalNAc4psGalNAc4 | | psmUpsmU | | |
| 160 | 603 | mApsmCpsmCmAmAmUfAmA | 516 | vmApsfApsmAmAmAfU | 44* | 88 |
| | | fGfAfAmAmAmUmGmAmUm | | mCmAmUmUmUmUmCf | | |
| | | UmUmUpsmU- | | UmUfAmUmUmGmGmU | | |
| | | GalNAc4psGalNAc4psGalNAc4 | | psmUpsmU | | |
| 161 | 595 | mUpsmGpsmGmUmAmUfCmA | 537 | vmApsfGpsmAmCmAfU | 64.9 | |
| | | fAfAfAmCmCmUmCmAmUm | | mGmAmGmGmUmUmUf | | |
| | | GmUmCmU- | | UmGfAmUmAmCmCmA | | |
| | | GalNAc4psGalNAc4psGalNAc4 | | psmUpsmU | | |
| 150 | 595 | mUpsmGpsmGmUmAmUfCmA | 623 | mApsfGpsmAmCmAfUm | 22.3 | |
| | | fAfAfAmCmCmUmCmAmUm | | GmAmGmGmUmUmUfU | | |
| | | GmUmCmU- | | mGfAmUmAmCmCmAps | | |
| | | GalNAc4psGalNAc4psGalNAc4 | | mUpsmU | | |
| 162 | 600 | mGpsmUpsmAmUmCmAfAmA | 538 | vmApsfGpsmAmGmAfC | 62.9 | |
| | | fAfCfCmUmCmAmUmGmUm | | mAmUmGmAmGmGmUf | | |
| | | CmUmCmU- | | UmUfUmGmAmUmAmC | | |
| | | GalNAc4psGalNAc4psGalNAc4 | | psmUpsmU | | |
| 152 | 597 | mGpsmUpsmAmUmCmAfAmA | 625 | mApsfGpsmAmGmAfCm | 49.7 | |
| | | fAfCfCmUmCmAmUmGmUm | | AmUmGmAmGmGmUfU | | |
| | | CmUmCmU- | | mUfUmGmAmUmAmCps | | |
| | | GalNAc4psGalNAc4psGalNAc4 | | mUpsmU | | |
| 132 | 577 | mUpsmGpsmGmAfGmUfCfGf | 605 | vmApsfApsmCmUmUfCm | 48.6 | |
| | | UmUmGmGmUmGmAmAmG | | AmCmCmAmAmCmGfA | | |
| | | mUmU- | | mCfUmCmCmApsmApsm | | |
| | | GalNAc4psGalNAc4psGalNAc4 | | G | | |
| 133 | 578 | mUpsmGpsmGmAfGmUfCfGf | 606 | mApsfApsmCmUmUfCm | 56.5* | |
| | | UmUmGmGmUmGmAmAmG | | AmCmCmAmAmCmGfA | | |
| | | mUmU- | | mCfUmCmCmApsmApsm | | |
| | | GalNAc4psGalNAc4psGalNAc4 | | G | | |
| 134 | 579 | mCpsmUpsmUmGmGmAfGmU | 607 | vmApsfApsmCmUmUfCm | 63.1 | |
| | | fCfGfUmUmGmGmUmGmAm | | AmCmCmAmAmCmGfA | | |
| | | AmGmUmU- | | mCfUmCmCmAmAmGps | | |
| | | GalNAc4psGalNAc4psGalNAc4 | | mUpsmA | | |
| 135 | 580 | mCpsmUpsmUmGmGmAfGmU | 608 | mApsfApsmCmUmUfCm | 57.1 | |
| | | fCfGfUmUmGmGmUmGmAm | | AmCmCmAmAmCmGfA | | |
| | | AmGmUmU- | | mCfUmCmCmAmAmGps | | |
| | | GalNAc4psGalNAc4psGalNAc4 | | mUpsmA | | |
| 137 | 582 | mGpsmGpsmUmGfAmAfGfUf | 610 | vmApsfGpsmGmAmAfU | 74.6* | 65.8 |
| | | UmUmUmUmCmAmUmUmC | | mGmAmAmAmAmAmCf | | |
| | | mCmU- | | UmUfCmAmCmCpsmAps | | |
| | | GalNAc4psGalNAc4psGalNAc4 | | mA | | |
| 138 | 583 | mGpsmGpsmUmGfAmAfGfUf | 611 | mApsfGpsmGmAmAfUm | 45.7 | |
| | | UmUmUmUmCmAmUmUmC | | GmAmAmAmAmAmCfU | | |
| | | mCmU- | | mUfCmAmCmCpsmApsm | | |
| | | GalNAc4psGalNAc4psGalNAc4 | | A | | |
| 139 | 584 | mUpsmUpsmGmGmUmGfAmA | 612 | vmApsfGpsmGmAmAfU | 64.5 | |
| | | fGfUfUmUmUmUmCmAmUm | | mGmAmAmAmAmAmCf | | |
| | | UmCmCmU- | | UmUfCmAmCmCmAmA | | |
| | | GalNAc4psGalNAc4psGalNAc4 | | psmCpsmG | | |
| 140 | 585 | mUpsmUpsmGmGmUmGfAmA | 613 | mApsfGpsmGmAmAfUm | 49.4 | |
| | | fGfUfUmUmUmUmCmAmUm | | GmAmAmAmAmAmCfU | | |
| | | UmCmCmU- | | mUfCmAmCmCmAmAps | | |
| | | GalNAc4psGalNAc4psGalNAc4 | | mCpsmG | | |
| 141 | 586 | mUpsmApsmUmUmGmGfUmU | 614 | mUpsfApsmAmUmAfUm | 16.3 | |
| | | fCfUfGmUmGmGmGmAmUm | | CmCmCmAmCmAmGfA | | |
| | | AmUmUmA- | | mAfCmCmAmAmUmAps | | |
| | | GalNAc4psGalNAc4psGalNAc4 | | mUpsmG | | |
| 142 | 587 | mUpsmApsmUmUmGmGfUmU | 615 | vmUpsfApsmAmUmAfU | 35 | |
| | | fCfUfGmUmGmGmGmAmUm | | mCmCmCmAmCmAmGf | | |
| | | AmUmUmA- | | AmAfCmCmAmAmUmA | | |
| | | GalNAc4psGalNAc4psGalNAc4 | | psmUpsmG | | |
| 143 | 588 | mUpsmApsmUmUmGmGfUmU | 616 | vmApsfApsmAmUmAfU | 50.6 | |
| | | fCfUfGmUmGmGmGmAmUm | | mCmCmCmAmCmAmGf | | |
| | | AmUmUmA- | | AmAfCmCmAmAmUmA | | |
| | | GalNAc4psGalNAc4psGalNAc4 | | psmUpsmG | | |
| 144 | 589 | mUpsmUpsmGmGmGmAfAmA | 617 | mUpsfUpsmUmGmAfUm | 37.4 | |
| | | fAfAfCmUmGmGmUmAmUm | | AmCmCmAmGmUmUfU | | |
| | | CmAmAmA- | | mUfUmCmCmCmAmAps | | |
| | | GalNAc4psGalNAc4psGalNAc4 | | mGpsmG | | |
| 145 | 590 | mUpsmUpsmGmGmGmAfAmA | 618 | vmUpsfUpsmUmGmAfU | 33.4 | |
| | | fAfAfCmUmGmGmUmAmUm | | mAmCmCmAmGmUmUf | | |
| | | CmAmAmA- | | UmUfUmCmCmCmAmA | | |
| | | GalNAc4psGalNAc4psGalNAc4 | | psmGpsmG | | |
| 146 | 591 | mUpsmUpsmGmGmGmAfAmA | 619 | vmApsfUpsmUmGmAfU | 35.8 | |
| | | fAfAfCmUmGmGmUmAmUm | | mAmCmCmAmGmUmUf | | |
| | | CmAmAmA- | | UmUfUmCmCmCmAmA | | |
| | | GalNAc4psGalNAc4psGalNAc4 | | psmGpsmG | | |
| 147 | 592 | mApsmCpsmCmAmAmUfAmA | 620 | mApsfApsmAmAmAfUm | 21.4 | |
| | | fGfAfAmAmAmUmGmAmUm | | CmAmUmUmUmUmCfU | | |
| | | UmUmUmU- | | mUfAmUmUmGmGmUps | | |
| | | GalNAc4psGalNAc4psGalNAc4 | | mApsmA | | |
| 148 | 593 | mApsmCpsmCmAmAmUfAmA | 621 | vmApsfApsmAmAmAfU | 52.0 | 69.9 |
| | | fGfAfAmAmAmUmGmAmUm | | mCmAmUmUmUmUmCf | | |
| | | UmUmUmU- | | UmUfAmUmUmGmGmU | | |
| | | GalNAc4psGalNAc4psGalNAc4 | | psmApsmA | | |
| 149 | 594 | mApsmCpsmCmAmAmUfAmA | 622 | vmUpsfApsmAmAmAfU | 45.5 | |
| | | fGfAfAmAmAmUmGmAmUm | | mCmAmUmUmUmUmCf | | |
| | | UmUmUmU- | | UmUfAmUmUmGmGmU | | |
| | | GalNAc4psGalNAc4psGalNAc4 | | psmApsmA | | |
| 153 | 598 | mGpsmUpsmAmUmCmAfAmA | 626 | mApsfGpsmAmGmAfCm | 61.6 | |
| | | fAfCfCmUmCmAmUmGmUm | | AmUmGmAmGmGmUfU | | |
| | | CmUmCmU- | | mUfUmGmAmUmAmCps | | |
| | | GalNAc4psGalNAc4psGalNAc4 | | mCpsmA | | |
| 154 | 599 | mGpsmUpsmAmUmCmAfAmA | 627 | vmApsfGpsmAmGmAfC | 70.3 | |
| | | fAfCfCmUmCmAmUmGmUm | | mAmUmGmAmGmGmUf | | |
| | | CmUmCmU- | | UmUfUmGmAmUmAmC | | |
| | | GalNAc4psGalNAc4psGalNAc4 | | psmCpsmA | | |
| 155 | 600 | mGpsmUpsmAmUmCmAfAmA | 628 | vmUpsfGpsmAmGmAfC | 53.2 | |
| | | fAfCfCmUmCmAmUmGmUm | | mAmUmGmAmGmGmUf | | |
| | | CmUmCmU- | | UmUfUmGmAmUmAmC | | |
| | | GalNAc4psGalNAc4psGalNAc4 | | psmCpsmA | | |
| 144 | 589 | mUpsmUpsmGmGmGmAfAmA | 617 | mUpsfUpsmUmGmAfUm | | 49.3 |
| | | fAfAfCmUmGmGmUmAmUm | | AmCmCmAmGmUmUfU | | |
| | | CmAmAmA- | | mUfUmCmCmCmAmAps | | |
| | | GalNAc4psGalNAc4psGalNAc4 | | mGpsmG | | |
| 151 | 596 | mUpsmGpsmGmUmAmUfCmA | 624 | vmApsfGpsmAmCmAfU | 53.6 | 73.6 |
| | | fAfAfAmCmCmUmCmAmUm | | mGmAmGmGmUmUmUf | | |
| | | GmUmCmU- | | UmGfAmUmAmCmCmA | | |
| | | GalNAc4psGalNAc4psGalNAc4 | | psmGpsmU | | |
| 164 | 582 | mGpsmGpsmUmGfAmAfGfUf | 630 | vmApsfGpsmGmAmAfUu | 7.6 | −37.1 |
| | | UmUmUmUmCmAmUmUmC | | nGmAmAmAmAmAmCf | | |
| | | mCmU- | | UmUfCmAmCmCpsmAps | | |
| | | GalNAc4psGalNAc4psGalNAc4 | | mA | | |
| 165 | 582 | mGpsmGpsmUmGfAmAfGfUf | 631 | vmApsfGpsmGmAmAfU | −21.8 | −48.2 |
| | | UmUmUmUmCmAmUmUmC | | mun34GmAmAmAmAmA | | |
| | | mCmU- | | mCfUmUfCmAmCmCpsm | | |
| | | GalNAc4psGalNAc4psGalNAc4 | | ApsmA | | |
| 166 | 582 | mGpsmGpsmUmGfAmAfGfUf | 632 | v- | 47 | 60 |
| | | UmUmUmUmCmAmUmUmC | | munUpsfGpsmGmAmAfU | | |
| | | mCmU- | | mGmAmAmAmAmAmCf | | |
| | | GalNAc4psGalNAc4psGalNAc4 | | UmUfCmAmCmCpsmAps | | |
| | | | | mA | | |
| 167 | 582 | mGpsmGpsmUmGfAmAfGfUf | 633 | 4hUpsfGpsmGmAmAfUm | 32 | 44 |
| | | UmUmUmUmCmAmUmUmC | | GmAmAmAmAmAmCfU | | |
| | | mCmU- | | mUfCmAmCmCpsmApsm | | |
| | | GalNAc4psGalNAc4psGalNAc4 | | A | | |
| 168 | 582 | mGpsmGpsmUmGfAmAfGfUf | 634 | c2o- | 25 | 50 |
| | | UmUmUmUmCmAmUmUmC | | 4hUpsfGpsmGmAmAfUm | | |
| | | mCmU- | | GmAmAmAmAmAmCfU | | |
| | | GalNAc4psGalNAc4psGalNAc4 | | mUfCmAmCmCpsmApsm | | |
| | | | | A | | |
| 169 | 592 | mApsmCpsmCmAmAmUfAmA | 635 | v- | | 52 |
| | | fGfAfAmAmAmUmGmAmUm | | munUpsfApsmAmAmAfU | | |
| | | UmUmUmU- | | mCmAmUmUmUmUmCf | | |
| | | GalNAc4psGalNAc4psGalNAc4 | | UmUfAmUmUmGmGmU | | |
| | | | | psmApsmA | | |
| 170 | 592 | mApsmCpsmCmAmAmUfAmA | 636 | 4hUpsfApsmAmAmAfUm | | 51 |
| | | fGfAfAmAmAmUmGmAmUm | | CmAmUmUmUmUmCfU | | |
| | | UmUmUmU- | | mUfAmUmUmGmGmUps | | |
| | | GalNAc4psGalNAc4psGalNAc4 | | mApsmA | | |
| 171 | 592 | mApsmCpsmCmAmAmUfAmA | 637 | c2o- | | 51 |
| | | fGfAfAmAmAmUmGmAmUm | | 4hUpsfApsmAmAmAfUm | | |
| | | UmUmUmU- | | CmAmUmUmUmUmCfU | | |
| | | GalNAc4psGalNAc4psGalNAc4 | | mUfAmUmUmGmGmUps | | |
| | | | | mApsmA | | |
| 172 | 638 | mApsmCpsmCmAmAmUfAmA | 621 | vmApsfApsmAmAmAfU | 55 | 69 |
| | | fGfAfAmAmAmUmGmAmUm | | mCmAmUmUmUmUmCf | | |
| | | UmUmUpsmU- | | UmUfAmUmUmGmGmU | | |
| | | GalNAc4psGalNAc4psGalNAc4 | | psmApsmA | | |
| 173 | 595 | mUpsmGpsmGmUmAmUfCmA | 639 | vmApsfGpsmAmCmAfUu | 32.9 | 71.8 |
| | | fAfAfAmCmCmUmCmAmUm | | nGmAmGmGmUmUmUf | | |
| | | GmUmCmU- | | UmGfAmUmAmCmCmA | | |
| | | GalNAc4psGalNAc4psGalNAc4 | | psmGpsmU | | |
| 174 | 595 | mUpsmGpsmGmUmAmUfCmA | 640 | vmApsfGpsmAmCmAfU | 32.6 | 74.5 |
| | | fAfAfAmCmCmUmCmAmUm | | mun34GmAmGmGmUmU | | |
| | | GmUmCmU- | | mUfUmGfAmUmAmCmC | | |
| | | GalNAc4psGalNAc4psGalNAc4 | | mApsmGpsmU | | |

*indicates an average over more than one trial

[0802] Protein knockdown for several duplexes was also assessed by western blot after 7 days (FIG. 11) and quantified (FIG. 12 and Table 5) and 14 days (FIG. 14) and quantified (FIG. 15 and Table 6). In addition, HSD17B13 mRNA knockdown results after 14 days for some duplexes are shown in FIG. 16 and Table 7.

TABLE 5
In Vivo Study-7 Days KD-Protein

| | | | | | % Protein | |
|---|---|---|---|---|---|---|
| mds- | SEQ | Sense Strand Base | SEQ | Antisense Strand Base | Inhibition (Drug v. | |
| siNA | ID | Sequence + Modifications | ID | Sequence + Modifications | Vehicle) | |
| (MD#) | NO. | (5′-3′) | NO. | (5′-3′) | 1.5 mg/kg | 5 mg/kg |
| 137 | 582 | mGpsmGpsmUmGfAmAfGfUfUmU | 610 | vmApsfGpsmGmAmAfU | | 67.26 |
| | | mUmUmCmAmUmUmCmCmU- | | mGmAmAmAmAmAmCf | | |
| | | GalNAc4psGalNAc4psGalNAc4 | | UmUfCmAmCmCpsmAps | | |
| | | | | mA | | |
| 144 | 589 | mUpsmUpsmGmGmGmAfAmAfAf | 617 | mUpsfUpsmUmGmAfUm | | 32.53 |
| | | AfCmUmGmGmUmAmUmCmAmA | | AmCmCmAmGmUmUfU | | |
| | | mA-GalNAc4psGalNAc4psGalNAc4 | | mUfUmCmCmCmAmAps | | |
| | | | | mGpsmG | | |
| 148 | 593 | mApsmCpsmCmAmAmUfAmAfGfA | 621 | vmApsfApsmAmAmAfU | | 46.6 |
| | | fAmAmAmUmGmAmUmUmUmUm | | mCmAmUmUmUmUmCf | | |
| | | U-GalNAc4psGalNAc4psGalNAc4 | | UmUfAmUmUmGmGmU | | |
| | | | | psmApsmA | | |
| 151 | 596 | mUpsmGpsmGmUmAmUfCmAfAf | 624 | vmApsfGpsmAmCmAfU | 55.26 | 87.07 |
| | | AfAmCmCmUmCmAmUmGmUmC | | mGmAmGmGmUmUmUf | | |
| | | mU-GalNAc4psGalNAc4psGalNAc4 | | UmGfAmUmAmCmCmA | | |
| | | | | psmGpsmU | | |

TABLE 6
In Vivo Study-14 Days KD-Protein

| | | | | | % Protein | |
|---|---|---|---|---|---|---|
| | SEQ | Sense Strand Base | SEQ | Antisense Strand Base | Inhibition (Drug v. | |
| mds- | ID | Sequence + Modifications | ID | Sequence + Modifications | Vehicle) | |
| siNA | NO. | (5′-3′) | NO. | (5′-3′) | 1.5 mg/kg | 5 mg/kg |
| 137 | 582 | mGpsmGpsmUmGfAmAfGfUfUmU | 610 | vmApsfGpsmGmAmAfU | | 86.1 |
| | | mUmUmCmAmUmUmCmCmU- | | mGmAmAmAmAmAmCf | | |
| | | GalNAc4psGalNAc4psGalNAc4 | | UmUfCmAmCmCpsmAps | | |
| | | | | mA | | |
| 144 | 589 | mUpsmUpsmGmGmGmAfAmAfAf | 617 | mUpsfUpsmUmGmAfUm | | 80.5 |
| | | AfCmUmGmGmUmAmUmCmAmA | | AmCmCmAmGmUmUfU | | |
| | | mA-GalNAc4psGalNAc4psGalNAc4 | | mUfUmCmCmCmAmAps | | |
| | | | | mGpsmG | | |
| 148 | 593 | mApsmCpsmCmAmAmUfAmAfGfA | 621 | vmApsfApsmAmAmAfU | | 62 |
| | | fAmAmAmUmGmAmUmUmUmUm | | mCmAmUmUmUmUmCf | | |
| | | U-GalNAc4psGalNAc4psGalNAc4 | | UmUfAmUmUmGmGmU | | |
| | | | | psmApsmA | | |
| 151 | 596 | mUpsmGpsmGmUmAmUfCmAfAf | 624 | vmApsfGpsmAmCmAfU | 81.3 | 84.7 |
| | | AfAmCmCmUmCmAmUmGmUmC | | mGmAmGmGmUmUmUf | | |
| | | mU-GalNAc4psGalNAc4psGalNAc4 | | UmGfAmUmAmCmCmA | | |
| | | | | psmGpsmU | | |

TABLE 7
In Vivo Study-14 Days KD-mRNA

| | SEQ | Sense Strand Base | SEQ | Antisense Strand Base | % RNA Inhibition | |
|---|---|---|---|---|---|---|
| mds- | ID | Sequence + Modifications | ID | Sequence + Modifications | (Drug v. Vehicle) | |
| siNA | NO. | (5′-3′) | NO. | (5′-3′) | 1.5 mg/kg | 5 mg/kg |
| 137 | 582 | mGpsmGpsmUmGfAmAfGfUfUmU | 610 | vmApsfGpsmGmAmAfU | | 58.1 |
| | | mUmUmCmAmUmUmCmCmU- | | mGmAmAmAmAmAmCf | | |
| | | GalNAc4psGalNAc4psGalNAc4 | | UmUfCmAmCmCpsmAps | | |
| | | | | mA | | |
| 144 | 589 | mUpsmUpsmGmGmGmAfAmAfAf | 617 | mUpsfUpsmUmGmAfUm | | 61.9 |
| | | AfCmUmGmGmUmAmUmCmAmA | | AmCmCmAmGmUmUfU | | |
| | | mA-GalNAc4psGalNAc4psGalNAc4 | | mUfUmCmCmCmAmAps | | |
| | | | | mGpsmG | | |
| 148 | 593 | mApsmCpsmCmAmAmUfAmAfGfA | 621 | vmApsfApsmAmAmAfU | | 46.9 |
| | | fAmAmAmUmGmAmUmUmUmUm | | mCmAmUmUmUmUmCf | | |
| | | U-GalNAc4psGalNAc4psGalNAc4 | | UmUfAmUmUmGmGmU | | |
| | | | | psmApsmA | | |
| 151 | 596 | mUpsmGpsmGmUmAmUfCmAfAfA | 624 | vmApsfGpsmAmCmAfU | 60 | 65 |
| | | fAmCmCmUmCmAmUmGmUmCm | | mGmAmGmGmUmUmUf | | |
| | | U-GalNAc4psGalNAc4psGalNAc4 | | UmGfAmUmAmCmCmA | | |
| | | | | psmGpsmU | | |

TABLE 8
21-mers with 5′-VP in AS

| | SEQ | Sense/ | | | SEQ | |
|---|---|---|---|---|---|---|
| | ID | Anti- | | | ID | |
| D# | NO. | sense | Base Sequence (5′-3′) | MD# | NO. | Modified Sequence (5′-3′) |
| 1 | 1 | Sense | CAUCAUCUACUCC | 1 | 316 | mCpsmApsmUmCmAmUfCmU |
| | | | UACUUGGA | | | fAfCfUmCmCmUmAmCmUmU |
| | | | | | | mGmGpsmA |
| | 101 | Anti- | UCCAAGUAGGAGU | | 446 | vmUpsfCpsmCmAmAfGmUmA |
| | | Sense | AGAUGAUGUU | | | mGmGmAmGmUfAmGfAmUm |
| | | | | | | GmAmUmGpsmUpsmU |
| 2 | 2 | Sense | CUACUCCUACUUG | 2 | 317 | mCpsmUpsmAmCmUmCfCmUf |
| | | | GAGUCGUU | | | AfCfUmUmGmGmAmGmUmC |
| | | | | | | mGmUpsmU |
| | 102 | Anti- | AACGACUCCAAGU | | 447 | vmApsfApsmCmGmAfCmUmC |
| | | Sense | AGGAGUAGUU | | | mCmAmAmGmUfAmGfGmAm |
| | | | | | | GmUmAmGpsmUpsmU |
| 3 | 3 | Sense | CCUACUUGGAGUC | 3 | 318 | mCpsmCpsmUmAmCmUfUmG |
| | | | GUUGGUGA | | | fGfAfGmUmCmGmUmUmGm |
| | | | | | | GmUmGpsmA |
| | 103 | Anti- | UCACCAACGACUC | | 448 | vmUpsfCpsmAmCmCfAmAmC |
| | | Sense | CAAGUAGGUU | | | mGmAmCmUmCfCmAfAmGm |
| | | | | | | UmAmGmGpsmUpsmU |
| 4 | 4 | Sense | CUACUUGGAGUCG | 4 | 319 | mCpsmUpsmAmCmUmUfGmG |
| | | | UUGGUGAA | | | fAfGfUmCmGmUmUmGmGm |
| | | | | | | UmGmApsmA |
| | 104 | Anti- | UUCACCAACGACU | | 449 | vmUpsfUpsmCmAmCfCmAmA |
| | | Sense | CCAAGUAGUU | | | mCmGmAmCmUfCmCfAmAm |
| | | | | | | GmUmAmGpsmUpsmU |
| 5 | 5 | Sense | CUUGGAGUCGUUG | 5 | 320 | mCpsmUpsmUmGmGmAfGmU |
| | | | GUGAAGUU | | | fCfGfUmUmGmGmUmGmAm |
| | | | | | | AmGmUpsmU |
| | 105 | Anti- | AACUUCACCAACG | | 450 | vmApsfApsmCmUmUfCmAmC |
| | | Sense | ACUCCAAGUU | | | mCmAmAmCmGfAmCfUmCm |
| | | | | | | CmAmAmGpsmUpsmU |
| 6 | 6 | Sense | UGGAGUCGUUGGU | 6 | 321 | mUpsmGpsmGmAmGmUfCmG |
| | | | GAAGUUUU | | | fUfUfGmGmUmGmAmAmGm |
| | | | | | | UmUmUpsmU |
| | 106 | Anti- | AAAACUUCACCAA | | 451 | vmApsfApsmAmAmCfUmUmC |
| | | Sense | CGACUCCAUU | | | mAmCmCmAmAfCmGfAmCm |
| | | | | | | UmCmCmApsmUpsmU |
| 7 | 7 | Sense | UUGGUGAAGUUUU | 7 | 322 | mUpsmUpsmGmGmUmGfAmA |
| | | | UCAUUCCU | | | fGfUfUmUmUmUmCmAmUm |
| | | | | | | UmCmCpsmU |
| | 107 | Anti- | AGGAAUGAAAAAC | | 452 | vmApsfGpsmGmAmAfUmGmA |
| | | Sense | UUCACCAAUU | | | mAmAmAmAmCfUmUfCmAm |
| | | | | | | CmCmAmApsmUpsmU |
| 8 | 8 | Sense | GGUGAAGUUUUUC | 8 | 323 | mGpsmGpsmUmGmAmAfGmU |
| | | | AUUCCUCA | | | fUfUfUmUmCmAmUmUmCm |
| | | | | | | CmUmCpsmA |
| | 108 | Anti- | UGAGGAAUGAAAA | | 453 | vmUpsfGpsmAmGmGfAmAmU |
| | | Sense | ACUUCACCUU | | | mGmAmAmAmAfAmCfUmUm |
| | | | | | | CmAmCmCpsmUpsmU |
| 9 | 9 | Sense | GGAAUAGGCAGGC | 9 | 324 | mGpsmGpsmAmAmUmAfGmG |
| | | | AGACUACU | | | fCfAfGmGmCmAmGmAmCm |
| | | | | | | UmAmCpsmU |
| | 109 | Anti- | AGUAGUCUGCCUG | | 454 | vmApsfGpsmUmAmGfUmCmU |
| | | Sense | CCUAUUCCUU | | | mGmCmCmUmGfCmCfUmAm |
| | | | | | | UmUmCmCpsmUpsmU |
| 10 | 10 | Sense | GAAUAGGCAGGCA | 10 | 325 | mGpsmApsmAmUmAmGfGmC |
| | | | GACUACUU | | | fAfGfGmCmAmGmAmCmUm |
| | | | | | | AmCmUpsmU |
| | 110 | Anti- | AAGUAGUCUGCCU | | 455 | vmApsfApsmGmUmAfGmUmC |
| | | Sense | GCCUAUUCUU | | | mUmGmCmCmUfGmCfCmUm |
| | | | | | | AmUmUmCpsmUpsmU |
| 11 | 11 | Sense | AAUAGGCAGGCAG | 11 | 326 | mApsmApsmUmAmGmGfCmA |
| | | | ACUACUUA | | | fGfGfCmAmGmAmCmUmAm |
| | | | | | | CmUmUpsmA |
| | 111 | Anti- | UAAGUAGUCUGCC | | 456 | vmUpsfApsmAmGmUfAmGmU |
| | | Sense | UGCCUAUUUU | | | mCmUmGmCmCfUmGfCmCm |
| | | | | | | UmAmUmUpsmUpsmU |
| 12 | 12 | Sense | AUAGGCAGGCAGA | 12 | 327 | mApsmUpsmAmGmGmCfAmG |
| | | | CUACUUAU | | | fGfCfAmGmAmCmUmAmCm |
| | | | | | | UmUmApsmU |
| | 112 | Anti- | AUAAGUAGUCUGC | | 457 | vmApsfUpsmAmAmGfUmAmG |
| | | Sense | CUGCCUAUUU | | | mUmCmUmGmCfCmUfGmCm |
| | | | | | | CmUmAmUpsmUpsmU |
| 13 | 13 | Sense | AGGCAGGCAGACU | 13 | 328 | mApsmGpsmGmCmAmGfGmC |
| | | | ACUUAUGA | | | fAfGfAmCmUmAmCmUmUm |
| | | | | | | AmUmGpsmA |
| | 113 | Anti- | UCAUAAGUAGUCU | | 458 | vmUpsfCpsmAmUmAfAmGmU |
| | | Sense | GCCUGCCUUU | | | mAmGmUmCmUfGmCfCmUm |
| | | | | | | GmCmCmUpsmUpsmU |
| 14 | 14 | Sense | GGCAGGCAGACUA | 14 | 329 | mGpsmGpsmCmAmGmGfCmA |
| | | | CUUAUGAA | | | fGfAfCmUmAmCmUmUmAm |
| | | | | | | UmGmApsmA |
| | 114 | Anti- | UUCAUAAGUAGUC | | 459 | vmUpsfUpsmCmAmUfAmAmG |
| | | Sense | UGCCUGCCUU | | | mUmAmGmUmCfUmGfCmCm |
| | | | | | | UmGmCmCpsmUpsmU |
| 15 | 15 | Sense | UAUUGGUUCUGUG | 15 | 330 | mUpsmApsmUmUmGmGfUmU |
| | | | GGAUAUUA | | | fCfUfGmUmGmGmGmAmUm |
| | | | | | | AmUmUpsmA |
| | 115 | Anti- | UAAUAUCCCACAG | | 460 | vmUpsfApsmAmUmAfUmCmC |
| | | Sense | AACCAAUAUU | | | mCmAmCmAmGfAmAfCmCm |
| | | | | | | AmAmUmApsmUpsmU |
| 16 | 16 | Sense | UUGGUUCUGUGGG | 16 | 331 | mUpsmUpsmGmGmUmUfCmU |
| | | | AUAUUAAU | | | fGfUfGmGmGmAmUmAmUm |
| | | | | | | UmAmApsmU |
| | 116 | Anti- | AUUAAUAUCCCAC | | 461 | vmApsfUpsmUmAmAfUmAmU |
| | | Sense | AGAACCAAUU | | | mCmCmCmAmCfAmGfAmAm |
| | | | | | | CmCmAmApsmUpsmU |
| 17 | 17 | Sense | GGUUCUGUGGGAU | 17 | 332 | mGpsmGpsmUmUmCmUfGmU |
| | | | AUUAAUAA | | | fGfGfGmAmUmAmUmUmAm |
| | | | | | | AmUmApsmA |
| | 117 | Anti- | UUAUUAAUAUCCC | | 462 | vmUpsfUpsmAmUmUfAmAmU |
| | | Sense | ACAGAACCUU | | | mAmUmCmCmCfAmCfAmGm |
| | | | | | | AmAmCmCpsmUpsmU |
| 18 | 18 | Sense | AUGUGGUAGACUG | 18 | 333 | mApsmUpsmGmUmGmGfUmA |
| | | | CAGCAACA | | | fGfAfCmUmGmCmAmGmCm |
| | | | | | | AmAmCpsmA |
| | 118 | Anti- | UGUUGCUGCAGUC | | 463 | vmUpsfGpsmUmUmGfCmUmG |
| | | Sense | UACCACAUUU | | | mCmAmGmUmCfUmAfCmCm |
| | | | | | | AmCmAmUpsmUpsmU |
| 19 | 19 | Sense | CUGCAGCAACAGA | 19 | 334 | mCpsmUpsmGmCmAmGfCmA |
| | | | GAAGAGAU | | | fAfCfAmGmAmGmAmAmGm |
| | | | | | | AmGmApsmU |
| | 119 | Anti- | AUCUCUUCUCUGU | | 464 | vmApsfUpsmCmUmCfUmUmC |
| | | Sense | UGCUGCAGUU | | | mUmCmUmGmUfUmGfCmUm |
| | | | | | | GmCmAmGpsmUpsmU |
| 20 | 20 | Sense | AAAUCAGGUGAAG | 20 | 335 | mApsmApsmAmUmCmAfGmG |
| | | | AAAGAAGU | | | fUfGfAmAmGmAmAmAmGm |
| | | | | | | AmAmGpsmU |
| | 120 | Anti- | ACUUCUUUCUUCA | | 465 | vmApsfCpsmUmUmCfUmUmU |
| | | Sense | CCUGAUUUUU | | | mCmUmUmCmAfCmCfUmGm |
| | | | | | | AmUmUmUpsmUpsmU |
| 21 | 21 | Sense | GAAGAAAGAAGUG | 21 | 336 | mGpsmApsmAmGmAmAfAmG |
| | | | GGUGAUGU | | | fAfAfGmUmGmGmGmUmGm |
| | | | | | | AmUmGpsmU |
| | 121 | Anti- | ACAUCACCCACUU | | 466 | vmApsfCpsmAmUmCfAmCmC |
| | | Sense | CUUUCUUCUU | | | mCmAmCmUmUfCmUfUmUm |
| | | | | | | CmUmUmCpsmUpsmU |
| 22 | 22 | Sense | CCAAGGAUGAAGA | 22 | 337 | mCpsmCpsmAmAmGmGfAmU |
| | | | GAUUACCA | | | fGfAfAmGmAmGmAmUmUm |
| | | | | | | AmCmCpsmA |
| | 122 | Anti- | UGGUAAUCUCUUC | | 467 | vmUpsfGpsmGmUmAfAmUmC |
| | | Sense | AUCCUUGGUU | | | mUmCmUmUmCfAmUfCmCm |
| | | | | | | UmUmGmGpsmUpsmU |
| 23 | 23 | Sense | GAAGAGAUUACCA | 23 | 338 | mGpsmApsmAmGmAmGfAmU |
| | | | AGACAUUU | | | fUfAfCmCmAmAmGmAmCm |
| | | | | | | AmUmUpsmU |
| | 123 | Anti- | AAAUGUCUUGGUA | | 468 | vmApsfApsmAmUmGfUmCmU |
| | | Sense | AUCUCUUCUU | | | mUmGmGmUmAfAmUfCmUm |
| | | | | | | CmUmUmCpsmUpsmU |
| 24 | 24 | Sense | AGAGAUUACCAAG | 24 | 339 | mApsmGpsmAmGmAmUfUmA |
| | | | ACAUUUGA | | | fCfCfAmAmGmAmCmAmUm |
| | | | | | | UmUmGpsmA |
| | 124 | Anti- | UCAAAUGUCUUGG | | 469 | vmUpsfCpsmAmAmAfUmGmU |
| | | Sense | UAAUCUCUUU | | | mCmUmUmGmGfUmAfAmUm |
| | | | | | | CmUmCmUpsmUpsmU |
| 25 | 25 | Sense | GAUUACCAAGACA | 25 | 340 | mGpsmApsmUmUmAmCfCmA |
| | | | UUUGAGGU | | | fAfGfAmCmAmUmUmUmGm |
| | | | | | | AmGmGpsmU |
| | 125 | Anti- | ACCUCAAAUGUCU | | 470 | vmApsfCpsmCmUmCfAmAmA |
| | | Sense | UGGUAAUCUU | | | mUmGmUmCmUfUmGfGmUm |
| | | | | | | AmAmUmCpsmUpsmU |
| 26 | 26 | Sense | UACCAAGACAUUU | 26 | 341 | mUpsmApsmCmCmAmAfGmA |
| | | | GAGGUCAA | | | fCfAfUmUmUmGmAmGmGm |
| | | | | | | UmCmApsmA |
| | 126 | Anti- | UUGACCUCAAAUG | | 471 | vmUpsfUpsmGmAmCfCmUmC |
| | | Sense | UCUUGGUAUU | | | mAmAmAmUmGfUmCfUmUm |
| | | | | | | GmGmUmApsmUpsmU |
| 27 | 27 | Sense | CCAAGACAUUUGA | 27 | 342 | mCpsmCpsmAmAmGmAfCmA |
| | | | GGUCAACA | | | fUfUfUmGmAmGmGmUmCm |
| | | | | | | AmAmCpsmA |
| | 127 | Anti- | UGUUGACCUCAAA | | 472 | vmUpsfGpsmUmUmGfAmCmC |
| | | Sense | UGUCUUGGUU | | | mUmCmAmAmAfUmGfUmCm |
| | | | | | | UmUmGmGpsmUpsmU |
| 28 | 28 | Sense | UGAGGUCAACAUC | 28 | 343 | mUpsmGpsmAmGmGmUfCmA |
| | | | CUAGGACA | | | fAfCfAmUmCmCmUmAmGm |
| | | | | | | GmAmCpsmA |
| | 128 | Anti- | UGUCCUAGGAUGU | | 473 | vmUpsfGpsmUmCmCfUmAmG |
| | | Sense | UGACCUCAUU | | | mGmAmUmGmUfUmGfAmCm |
| | | | | | | CmUmCmApsmUpsmU |
| 29 | 29 | Sense | AGGUCAACAUCCU | 29 | 344 | mApsmGpsmGmUmCmAfAmC |
| | | | AGGACAUU | | | fAfUfCmCmUmAmGmGmAm |
| | | | | | | CmAmUpsmU |
| | 129 | Anti- | AAUGUCCUAGGAU | | 474 | vmApsfApsmUmGmUfCmCmU |
| | | Sense | GUUGACCUUU | | | mAmGmGmAmUfGmUfUmGm |
| | | | | | | AmCmCmUpsmUpsmU |
| 30 | 30 | Sense | GUCAACAUCCUAG | 30 | 345 | mGpsmUpsmCmAmAmCfAmU |
| | | | GACAUUUU | | | fCfCfUmAmGmGmAmCmAm |
| | | | | | | UmUmUpsmU |
| | 130 | Anti- | AAAAUGUCCUAGG | | 475 | vmApsfApsmAmAmUfGmUmC |
| | | Sense | AUGUUGACUU | | | mCmUmAmGmGfAmUfGmUm |
| | | | | | | UmGmAmCpsmUpsmU |
| 31 | 31 | Sense | UCAACAUCCUAGG | 31 | 346 | mUpsmCpsmAmAmCmAfUmC |
| | | | ACAUUUUU | | | fCfUfAmGmGmAmCmAmUm |
| | | | | | | UmUmUpsmU |
| | 131 | Anti- | AAAAAUGUCCUAG | | 476 | vmApsfApsmAmAmAfUmGmU |
| | | Sense | GAUGUUGAUU | | | mCmCmUmAmGfGmAfUmGm |
| | | | | | | UmUmGmApsmUpsmU |
| 32 | 32 | Sense | CAUCCUAGGACAU | 32 | 347 | mCpsmApsmUmCmCmUfAmG |
| | | | UUUUGGAU | | | fGfAfCmAmUmUmUmUmUm |
| | | | | | | GmGmApsmU |
| | 132 | Anti- | AUCCAAAAAUGUC | | 477 | vmApsfUpsmCmCmAfAmAmA |
| | | Sense | CUAGGAUGUU | | | mAmUmGmUmCfCmUfAmGm |
| | | | | | | GmAmUmGpsmUpsmU |
| 33 | 33 | Sense | UCCUAGGACAUUU | 33 | 348 | mUpsmCpsmCmUmAmGfGmA |
| | | | UUGGAUCA | | | fCfAfUmUmUmUmUmGmGm |
| | | | | | | AmUmCpsmA |
| | 133 | Anti- | UGAUCCAAAAAUG | | 478 | vmUpsfGpsmAmUmCfCmAmA |
| | | Sense | UCCUAGGAUU | | | mAmAmAmUmGfUmCfCmUm |
| | | | | | | AmGmGmApsmUpsmU |
| 34 | 34 | Sense | AGGACAUUUUUGG | 34 | 349 | mApsmGpsmGmAmCmAfUmU |
| | | | AUCACAAA | | | fUfUfUmGmGmAmUmCmAm |
| | | | | | | CmAmApsmA |
| | 134 | Anti- | UUUGUGAUCCAAA | | 479 | vmUpsfUpsmUmGmUfGmAmU |
| | | Sense | AAUGUCCUUU | | | mCmCmAmAmAfAmAfUmGm |
| | | | | | | UmCmCmUpsmUpsmU |
| 35 | 35 | Sense | GGACAUUUUUGGA | 35 | 350 | mGpsmGpsmAmCmAmUfUmU |
| | | | UCACAAAA | | | fUfUfGmGmAmUmCmAmCm |
| | | | | | | AmAmApsmA |
| | 135 | Anti- | UUUUGUGAUCCAA | | 480 | vmUpsfUpsmUmUmGfUmGmA |
| | | Sense | AAAUGUCCUU | | | mUmCmCmAmAfAmAfAmUm |
| | | | | | | GmUmCmCpsmUpsmU |
| 36 | 36 | Sense | UUUUUGGAUCACA | 36 | 351 | mUpsmUpsmUmUmUmGfGmA |
| | | | AAAGCACU | | | fUfCfAmCmAmAmAmAmGm |
| | | | | | | CmAmCpsmU |
| | 136 | Anti- | AGUGCUUUUGUGA | | 481 | vmApsfGpsmUmGmCfUmUmU |
| | | Sense | UCCAAAAAUU | | | mUmGmUmGmAfUmCfCmAm |
| | | | | | | AmAmAmApsmUpsmU |
| 37 | 37 | Sense | UUGGAUCACAAAA | 37 | 352 | mUpsmUpsmGmGmAmUfCmA |
| | | | GCACUUCU | | | fCfAfAmAmAmGmCmAmCm |
| | | | | | | UmUmCpsmU |
| | 137 | Anti- | AGAAGUGCUUUUG | | 482 | vmApsfGpsmAmAmGfUmGmC |
| | | Sense | UGAUCCAAUU | | | mUmUmUmUmGfUmGfAmUm |
| | | | | | | CmCmAmApsmUpsmU |
| 38 | 38 | Sense | AUCACAAAAGCAC | 38 | 353 | mApsmUpsmCmAmCmAfAmA |
| | | | UUCUUCCA | | | fAfGfCmAmCmUmUmCmUm |
| | | | | | | UmCmCpsmA |
| | 138 | Anti- | UGGAAGAAGUGCU | | 483 | vmUpsfGpsmGmAmAfGmAmA |
| | | Sense | UUUGUGAUUU | | | mGmUmGmCmUfUmUfUmGm |
| | | | | | | UmGmAmUpsmUpsmU |
| 39 | 39 | Sense | UCACAAAAGCACU | 39 | 354 | mUpsmCpsmAmCmAmAfAmA |
| | | | UCUUCCAU | | | fGfCfAmCmUmUmCmUmUmC |
| | | | | | | mCmApsmU |
| | 139 | Anti- | AUGGAAGAAGUGC | | 484 | vmApsfUpsmGmGmAfAmGmA |
| | | Sense | UUUUGUGAUU | | | mAmGmUmGmCfUmUfUmUm |
| | | | | | | GmUmGmApsmUpsmU |
| 40 | 40 | Sense | AAGCACUUCUUCC | 40 | 355 | mApsmApsmGmCmAmCfUmU |
| | | | AUCGAUGA | | | fCfUfUmCmCmAmUmCmGmA |
| | | | | | | mUmGpsmA |
| | 140 | Anti- | UCAUCGAUGGAAG | | 485 | vmUpsfCpsmAmUmCfGmAmU |
| | | Sense | AAGUGCUUUU | | | mGmGmAmAmGfAmAfGmUm |
| | | | | | | GmCmUmUpsmUpsmU |
| 41 | 41 | Sense | AGCACUUCUUCCA | 41 | 356 | mApsmGpsmCmAmCmUfUmC |
| | | | UCGAUGAU | | | fUfUfCmCmAmUmCmGmAm |
| | | | | | | UmGmApsmU |
| | 141 | Anti- | AUCAUCGAUGGAA | | 486 | vmApsfUpsmCmAmUfCmGmA |
| | | Sense | GAAGUGCUUU | | | mUmGmGmAmAfGmAfAmGm |
| | | | | | | UmGmCmUpsmUpsmU |
| 42 | 42 | Sense | UUCCAUCGAUGAU | 42 | 357 | mUpsmUpsmCmCmAmUfCmG |
| | | | GGAGAGAA | | | fAfUfGmAmUmGmGmAmGm |
| | | | | | | AmGmApsmA |
| | 142 | Anti- | UUCUCUCCAUCAU | | 487 | vmUpsfUpsmCmUmCfUmCmC |
| | | Sense | CGAUGGAAUU | | | mAmUmCmAmUfCmGfAmUm |
| | | | | | | GmGmAmApsmUpsmU |
| 43 | 43 | Sense | CAUCGUCACAGUG | 43 | 358 | mCpsmApsmUmCmGmUfCmA |
| | | | GCUUCAGU | | | fCfAfGmUmGmGmCmUmUm |
| | | | | | | CmAmGpsmU |
| | 143 | Anti- | ACUGAAGCCACUG | | 488 | vmApsfCpsmUmGmAfAmGmC |
| | | Sense | UGACGAUGUU | | | mCmAmCmUmGfUmGfAmCm |
| | | | | | | GmAmUmGpsmUpsmU |
| 44 | 44 | Sense | UCGUCACAGUGGC | 44 | 359 | mUpsmCpsmGmUmCmAfCmA |
| | | | UUCAGUGU | | | fGfUfGmGmCmUmUmCmAm |
| | | | | | | GmUmGpsmU |
| | 144 | Anti- | ACACUGAAGCCAC | | 489 | vmApsfCpsmAmCmUfGmAmA |
| | | Sense | UGUGACGAUU | | | mGmCmCmAmCfUmGfUmGm |
| | | | | | | AmCmGmApsmUpsmU |
| 45 | 45 | Sense | GAUUCCUUACCUC | 45 | 360 | mGpsmApsmUmUmCmCfUmU |
| | | | AUCCCAUA | | | fAfCfCmUmCmAmUmCmCmC |
| | | | | | | mAmUpsmA |
| | 145 | Anti- | UAUGGGAUGAGGU | | 490 | vmUpsfApsmUmGmGfGmAmU |
| | | Sense | AAGGAAUCUU | | | mGmAmGmGmUfAmAfGmGm |
| | | | | | | AmAmUmCpsmUpsmU |
| 46 | 46 | Sense | AUUCCUUACCUCA | 46 | 361 | mApsmUpsmUmCmCmUfUmA |
| | | | UCCCAUAU | | | fCfCfUmCmAmUmCmCmCmA |
| | | | | | | mUmApsmU |
| | 146 | Anti- | AUAUGGGAUGAGG | | 491 | vmApsfUpsmAmUmGfGmGmA |
| | | Sense | UAAGGAAUUU | | | mUmGmAmGmGfUmAfAmGm |
| | | | | | | GmAmAmUpsmUpsmU |
| 47 | 47 | Sense | UUCCUUACCUCAU | 47 | 362 | mUpsmUpsmCmCmUmUfAmC |
| | | | CCCAUAUU | | | fCfUfCmAmUmCmCmCmAmU |
| | | | | | | mAmUpsmU |
| | 147 | Anti- | AAUAUGGGAUGAG | | 492 | vmApsfApsmUmAmUfGmGmG |
| | | Sense | GUAAGGAAUU | | | mAmUmGmAmGfGmUfAmAm |
| | | | | | | GmGmAmApsmUpsmU |
| 48 | 48 | Sense | AUCCCAUAUUGUU | 48 | 363 | mApsmUpsmCmCmCmAfUmA |
| | | | CCAGCAAA | | | fUfUfGmUmUmCmCmAmGm |
| | | | | | | CmAmApsmA |
| | 148 | Anti- | UUUGCUGGAACAA | | 493 | vmUpsfUpsmUmGmCfUmGmG |
| | | Sense | UAUGGGAUUU | | | mAmAmCmAmAfUmAfUmGm |
| | | | | | | GmGmAmUpsmUpsmU |
| 49 | 49 | Sense | UCCCAUAUUGUUC | 49 | 364 | mUpsmCpsmCmCmAmUfAmU |
| | | | CAGCAAAU | | | fUfGfUmUmCmCmAmGmCm |
| | | | | | | AmAmApsmU |
| | 149 | Anti- | AUUUGCUGGAACA | | 494 | vmApsfUpsmUmUmGfCmUmG |
| | | Sense | AUAUGGGAUU | | | mGmAmAmCmAfAmUfAmUm |
| | | | | | | GmGmGmApsmUpsmU |
| 50 | 50 | Sense | UUGGGAAAAACUG | 50 | 365 | mUpsmUpsmGmGmGmAfAmA |
| | | | GUAUCAAA | | | fAfAfCmUmGmGmUmAmUm |
| | | | | | | CmAmApsmA |
| | 150 | Anti- | UUUGAUACCAGUU | | 495 | vmUpsfUpsmUmGmAfUmAmC |
| | | Sense | UUUCCCAAUU | | | mCmAmGmUmUfUmUfUmCm |
| | | | | | | CmCmAmApsmUpsmU |
| 51 | 51 | Sense | AAAACUGGUAUCA | 51 | 366 | mApsmApsmAmAmCmUfGmG |
| | | | AAACCUCA | | | fUfAfUmCmAmAmAmAmCm |
| | | | | | | CmUmCpsmA |
| | 151 | Anti- | UGAGGUUUUGAUA | | 496 | vmUpsfGpsmAmGmGfUmUmU |
| | | Sense | CCAGUUUUUU | | | mUmGmAmUmAfCmCfAmGm |
| | | | | | | UmUmUmUpsmUpsmU |
| 52 | 52 | Sense | AAUACUGGGUUCA | 52 | 367 | mApsmApsmUmAmCmUfGmG |
| | | | CCAAAAAU | | | fGfUfUmCmAmCmCmAmAm |
| | | | | | | AmAmApsmU |
| | 152 | Anti- | AUUUUUGGUGAAC | | 497 | vmApsfUpsmUmUmUfUmGmG |
| | | Sense | CCAGUAUUUU | | | mUmGmAmAmCfCmCfAmGm |
| | | | | | | UmAmUmUpsmUpsmU |
| 53 | 53 | Sense | CUGGGUUCACCAA | 53 | 368 | mCpsmUpsmGmGmGmUfUmC |
| | | | AAAUCCAA | | | fAfCfCmAmAmAmAmAmUm |
| | | | | | | CmCmApsmA |
| | 153 | Anti- | UUGGAUUUUUGGU | | 498 | vmUpsfUpsmGmGmAfUmUmU |
| | | Sense | GAACCCAGUU | | | mUmUmGmGmUfGmAfAmCm |
| | | | | | | CmCmAmGpsmUpsmU |
| 54 | 54 | Sense | ACCAAAAAUCCAA | 54 | 369 | mApsmCpsmCmAmAmAfAmA |
| | | | GCACAAGA | | | fUfCfCmAmAmGmCmAmCmA |
| | | | | | | mAmGpsmA |
| | 154 | Anti- | UCUUGUGCUUGGA | | 499 | vmUpsfCpsmUmUmGfUmGmC |
| | | Sense | UUUUUGGUUU | | | mUmUmGmGmAfUmUfUmUm |
| | | | | | | UmGmGmUpsmUpsmU |
| 55 | 55 | Sense | GCCUGUAUUGGAG | 55 | 370 | mGpsmCpsmCmUmGmUfAmU |
| | | | ACAGAUGA | | | fUfGfGmAmGmAmCmAmGm |
| | | | | | | AmUmGpsmA |
| | 155 | Anti- | UCAUCUGUCUCCA | | 500 | vmUpsfCpsmAmUmCfUmGmU |
| | | Sense | AUACAGGCUU | | | mCmUmCmCmAfAmUfAmCm |
| | | | | | | AmGmGmCpsmUpsmU |
| 56 | 56 | Sense | UGAAGUCGUAAGA | 56 | 371 | mUpsmGpsmAmAmGmUfCmG |
| | | | AGUCUGAU | | | fUfAfAmGmAmAmGmUmCm |
| | | | | | | UmGmApsmU |
| | 156 | Anti- | AUCAGACUUCUUA | | 501 | vmApsfUpsmCmAmGfAmCmU |
| | | Sense | CGACUUCAUU | | | mUmCmUmUmAfCmGfAmCm |
| | | | | | | UmUmCmApsmUpsmU |
| 57 | 57 | Sense | UAAGAAGUCUGAU | 57 | 372 | mUpsmApsmAmGmAmAfGmU |
| | | | AGAUGGAA | | | fCfUfGmAmUmAmGmAmUm |
| | | | | | | GmGmApsmA |
| | 157 | Anti- | UUCCAUCUAUCAG | | 502 | vmUpsfUpsmCmCmAfUmCmU |
| | | Sense | ACUUCUUAUU | | | mAmUmCmAmGfAmCfUmUm |
| | | | | | | CmUmUmApsmUpsmU |
| 58 | 58 | Sense | AAGAAGUCUGAUA | 58 | 373 | mApsmApsmGmAmAmGfUmC |
| | | | GAUGGAAU | | | fUfGfAmUmAmGmAmUmGm |
| | | | | | | GmAmApsmU |
| | 158 | Anti- | AUUCCAUCUAUCA | | 503 | vmApsfUpsmUmCmCfAmUmC |
| | | Sense | GACUUCUUUU | | | mUmAmUmCmAfGmAfCmUm |
| | | | | | | UmCmUmUpsmUpsmU |
| 59 | 59 | Sense | AGAAGUCUGAUAG | 59 | 374 | mApsmGpsmAmAmGmUfCmU |
| | | | AUGGAAUA | | | fGfAfUmAmGmAmUmGmGm |
| | | | | | | AmAmUpsmA |
| | 159 | Anti- | UAUUCCAUCUAUC | | 504 | vmUpsfApsmUmUmCfCmAmU |
| | | Sense | AGACUUCUUU | | | mCmUmAmUmCfAmGfAmCm |
| | | | | | | UmUmCmUpsmUpsmU |
| 60 | 60 | Sense | AAGUCUGAUAGAU | 60 | 375 | mApsmApsmGmUmCmUfGmA |
| | | | GGAAUACU | | | fUfAfGmAmUmGmGmAmAm |
| | | | | | | UmAmCpsmU |
| | 160 | Anti- | AGUAUUCCAUCUA | | 505 | vmApsfGpsmUmAmUfUmCmC |
| | | Sense | UCAGACUUUU | | | mAmUmCmUmAfUmCfAmGm |
| | | | | | | AmCmUmUpsmUpsmU |
| 61 | 61 | Sense | AGUCUGAUAGAUG | 61 | 376 | mApsmGpsmUmCmUmGfAmU |
| | | | GAAUACUU | | | fAfGfAmUmGmGmAmAmUm |
| | | | | | | AmCmUpsmU |
| | 161 | Anti- | AAGUAUUCCAUCU | | 506 | vmApsfApsmGmUmAfUmUmC |
| | | Sense | AUCAGACUUU | | | mCmAmUmCmUfAmUfCmAm |
| | | | | | | GmAmCmUpsmUpsmU |
| 62 | 62 | Sense | GUCUGAUAGAUGG | 62 | 377 | mGpsmUpsmCmUmGmAfUmA |
| | | | AAUACUUA | | | fGfAfUmGmGmAmAmUmAm |
| | | | | | | CmUmUpsmA |
| | 162 | Anti- | UAAGUAUUCCAUC | | 507 | vmUpsfApsmAmGmUfAmUmU |
| | | Sense | UAUCAGACUU | | | mCmCmAmUmCfUmAfUmCm |
| | | | | | | AmGmAmCpsmUpsmU |
| 63 | 63 | Sense | AGAUGGAAUACUU | 63 | 378 | mApsmGpsmAmUmGmGfAmA |
| | | | ACCAAUAA | | | fUfAfCmUmUmAmCmCmAm |
| | | | | | | AmUmApsmA |
| | 163 | Anti- | UUAUUGGUAAGUA | | 508 | vmUpsfUpsmAmUmUfGmGmU |
| | | Sense | UUCCAUCUUU | | | mAmAmGmUmAfUmUfCmCm |
| | | | | | | AmUmCmUpsmUpsmU |
| 64 | 64 | Sense | UGGAAUACUUACC | 64 | 379 | mUpsmGpsmGmAmAmUfAmC |
| | | | AAUAAGAA | | | fUfUfAmCmCmAmAmUmAm |
| | | | | | | AmGmApsmA |
| | 164 | Anti- | UUCUUAUUGGUAA | | 509 | vmUpsfUpsmCmUmUfAmUmU |
| | | Sense | GUAUUCCAUU | | | mGmGmUmAmAfGmUfAmUm |
| | | | | | | UmCmCmApsmUpsmU |
| 65 | 65 | Sense | GAAUACUUACCAA | 65 | 380 | mGpsmApsmAmUmAmCfUmU |
| | | | UAAGAAAA | | | fAfCfCmAmAmUmAmAmGm |
| | | | | | | AmAmApsmA |
| | 165 | Anti- | UUUUCUUAUUGGU | | 510 | vmUpsfUpsmUmUmCfUmUmA |
| | | Sense | AAGUAUUCUU | | | mUmUmGmGmUfAmAfGmUm |
| | | | | | | AmUmUmCpsmUpsmU |
| 66 | 66 | Sense | AAUACUUACCAAU | 66 | 381 | mApsmApsmUmAmCmUfUmA |
| | | | AAGAAAAU | | | fCfCfAmAmUmAmAmGmAm |
| | | | | | | AmAmApsmU |
| | 166 | Anti- | AUUUUCUUAUUGG | | 511 | vmApsfUpsmUmUmUfCmUmU |
| | | Sense | UAAGUAUUUU | | | mAmUmUmGmGfUmAfAmGm |
| | | | | | | UmAmUmUpsmUpsmU |
| 67 | 67 | Sense | ACUUACCAAUAAG | 67 | 382 | mApsmCpsmUmUmAmCfCmA |
| | | | AAAAUGAU | | | fAfUfAmAmGmAmAmAmAm |
| | | | | | | UmGmApsmU |
| | 167 | Anti- | AUCAUUUUCUUAU | | 512 | vmApsfUpsmCmAmUfUmUmU |
| | | Sense | UGGUAAGUUU | | | mCmUmUmAmUfUmGfGmUm |
| | | | | | | AmAmGmUpsmUpsmU |
| 68 | 68 | Sense | CUUACCAAUAAGA | 68 | 383 | mCpsmUpsmUmAmCmCfAmA |
| | | | AAAUGAUU | | | fUfAfAmGmAmAmAmAmUm |
| | | | | | | GmAmUpsmU |
| | 168 | Anti- | AAUCAUUUUCUUA | | 513 | vmApsfApsmUmCmAfUmUmU |
| | | Sense | UUGGUAAGUU | | | mUmCmUmUmAfUmUfGmGm |
| | | | | | | UmAmAmGpsmUpsmU |
| 69 | 69 | Sense | UUACCAAUAAGAA | 69 | 384 | mUpsmUpsmAmCmCmAfAmU |
| | | | AAUGAUUU | | | fAfAfGmAmAmAmAmUmGm |
| | | | | | | AmUmUpsmU |
| | 169 | Anti- | AAAUCAUUUUCUU | | 514 | vmApsfApsmAmUmCfAmUmU |
| | | Sense | AUUGGUAAUU | | | mUmUmCmUmUfAmUfUmGm |
| | | | | | | GmUmAmApsmUpsmU |
| 70 | 70 | Sense | UACCAAUAAGAAA | 70 | 385 | mUpsmApsmCmCmAmAfUmA |
| | | | AUGAUUUU | | | fAfGfAmAmAmAmUmGmAm |
| | | | | | | UmUmUpsmU |
| | 170 | Anti- | AAAAUCAUUUUCU | | 515 | vmApsfApsmAmAmUfCmAmU |
| | | Sense | UAUUGGUAUU | | | mUmUmUmCmUfUmAfUmUm |
| | | | | | | GmGmUmApsmUpsmU |
| 71 | 71 | Sense | ACCAAUAAGAAAA | 71 | 386 | mApsmCpsmCmAmAmUfAmA |
| | | | UGAUUUUU | | | fGfAfAmAmAmUmGmAmUm |
| | | | | | | UmUmUpsmU |
| | 171 | Anti- | AAAAAUCAUUUUC | | 516 | vmApsfApsmAmAmAfUmCmA |
| | | Sense | UUAUUGGUUU | | | mUmUmUmUmCfUmUfAmUm |
| | | | | | | UmGmGmUpsmUpsmU |
| 72 | 72 | Sense | CAAUAAGAAAAUG | 72 | 387 | mCpsmApsmAmUmAmAfGmA |
| | | | AUUUUUGU | | | fAfAfAmUmGmAmUmUmUm |
| | | | | | | UmUmGpsmU |
| | 172 | Anti- | ACAAAAAUCAUUU | | 517 | vmApsfCpsmAmAmAfAmAmU |
| | | Sense | UCUUAUUGUU | | | mCmAmUmUmUfUmCfUmUm |
| | | | | | | AmUmUmGpsmUpsmU |
| 73 | 73 | Sense | AAUAAGAAAAUGA | 73 | 388 | mApsmApsmUmAmAmGfAmA |
| | | | UUUUUGUU | | | fAfAfUmGmAmUmUmUmUm |
| | | | | | | UmGmUpsmU |
| | 173 | Anti- | AACAAAAAUCAUU | | 518 | vmApsfApsmCmAmAfAmAmA |
| | | Sense | UUCUUAUUUU | | | mUmCmAmUmUfUmUfCmUm |
| | | | | | | UmAmUmUpsmUpsmU |
| 74 | 74 | Sense | AAGAAAAUGAUUU | 74 | 389 | mApsmApsmGmAmAmAfAmU |
| | | | UUGUUCCA | | | fGfAfUmUmUmUmUmGmUm |
| | | | | | | UmCmCpsmA |
| | 174 | Anti- | UGGAACAAAAAUC | | 519 | vmUpsfGpsmGmAmAfCmAmA |
| | | Sense | AUUUUCUUUU | | | mAmAmAmUmCfAmUfUmUm |
| | | | | | | UmCmUmUpsmUpsmU |
| 75 | 75 | Sense | AGAAAAUGAUUUU | 75 | 390 | mApsmGpsmAmAmAmAfUmG |
| | | | UGUUCCAU | | | fAfUfUmUmUmUmGmUmUm |
| | | | | | | CmCmApsmU |
| | 175 | Anti- | AUGGAACAAAAAU | | 520 | vmApsfUpsmGmGmAfAmCmA |
| | | Sense | CAUUUUCUUU | | | mAmAmAmAmUfCmAfUmUm |
| | | | | | | UmUmCmUpsmUpsmU |
| 76 | 76 | Sense | AAUGAUUUUUGUU | 76 | 391 | mApsmApsmUmGmAmUfUmU |
| | | | CCAUCGUA | | | fUfUfGmUmUmCmCmAmUm |
| | | | | | | CmGmUpsmA |
| | 176 | Anti- | UACGAUGGAACAA | | 521 | vmUpsfApsmCmGmAfUmGmG |
| | | Sense | AAAUCAUUUU | | | mAmAmCmAmAfAmAfAmUm |
| | | | | | | CmAmUmUpsmUpsmU |
| 77 | 77 | Sense | AUGAUUUUUGUUC | 77 | 392 | mApsmUpsmGmAmUmUfUmU |
| | | | CAUCGUAU | | | fUfGfUmUmCmCmAmUmCm |
| | | | | | | GmUmApsmU |
| | 177 | Anti- | AUACGAUGGAACA | | 522 | vmApsfUpsmAmCmGfAmUmG |
| | | Sense | AAAAUCAUUU | | | mGmAmAmCmAfAmAfAmAm |
| | | | | | | UmCmAmUpsmUpsmU |
| 78 | 78 | Sense | UUUUGUUCCAUCG | 78 | 393 | mUpsmUpsmUmUmGmUfUmC |
| | | | UAUAUCAA | | | fCfAfUmCmGmUmAmUmAm |
| | | | | | | UmCmApsmA |
| | 178 | Anti- | UUGAUAUACGAUG | | 523 | vmUpsfUpsmGmAmUfAmUmA |
| | | Sense | GAACAAAAUU | | | mCmGmAmUmGfGmAfAmCm |
| | | | | | | AmAmAmApsmUpsmU |
| 79 | 79 | Sense | UUUGUUCCAUCGU | 79 | 394 | mUpsmUpsmUmGmUmUfCmC |
| | | | AUAUCAAU | | | fAfUfCmGmUmAmUmAmUm |
| | | | | | | CmAmApsmU |
| | 179 | Anti- | AUUGAUAUACGAU | | 524 | vmApsfUpsmUmGmAfUmAmU |
| | | Sense | GGAACAAAUU | | | mAmCmGmAmUfGmGfAmAm |
| | | | | | | CmAmAmApsmUpsmU |
| 80 | 80 | Sense | UUCAUUCCUCAGA | 80 | 395 | mUpsmUpsmCmAmUmUfCmC |
| | | | GGAGAAAA | | | fUfCfAmGmAmGmGmAmGm |
| | | | | | | AmAmApsmA |
| | 180 | Anti- | UUUUCUCCUCUGA | | 525 | vmUpsfUpsmUmUmCfUmCmC |
| | | Sense | GGAAUGAAUU | | | mUmCmUmGmAfGmGfAmAm |
| | | | | | | UmGmAmApsmUpsmU |
| 81 | 81 | Sense | AGAAAGAAGUGGG | 81 | 396 | mApsmGpsmAmAmAmGfAmA |
| | | | UGAUGUAA | | | fGfUfGmGmGmUmGmAmUm |
| | | | | | | GmUmApsmA |
| | 181 | Anti- | UUACAUCACCCAC | | 526 | vmUpsfUpsmAmCmAfUmCmA |
| | | Sense | UUCUUUCUUU | | | mCmCmCmAmCfUmUfCmUm |
| | | | | | | UmUmCmUpsmUpsmU |
| 82 | 82 | Sense | CAAGGAUGAAGAG | 82 | 397 | mCpsmApsmAmGmGmAfUmG |
| | | | AUUACCAA | | | fAfAfGmAmGmAmUmUmAm |
| | | | | | | CmCmApsmA |
| | 182 | Anti- | UUGGUAAUCUCUU | | 527 | vmUpsfUpsmGmGmUfAmAmU |
| | | Sense | CAUCCUUGUU | | | mCmUmCmUmUfCmAfUmCm |
| | | | | | | CmUmUmGpsmUpsmU |
| 83 | 83 | Sense | CUAGGACAUUUUU | 83 | 398 | mCpsmUpsmAmGmGmAfCmA |
| | | | GGAUCACA | | | fUfUfUmUmUmGmGmAmUm |
| | | | | | | CmAmCpsmA |
| | 183 | Anti- | UGUGAUCCAAAAA | | 528 | vmUpsfGpsmUmGmAfUmCmC |
| | | Sense | UGUCCUAGUU | | | mAmAmAmAmAfUmGfUmCm |
| | | | | | | CmUmAmGpsmUpsmU |
| 84 | 84 | Sense | UGGAUCACAAAAG | 84 | 399 | mUpsmGpsmGmAmUmCfAmC |
| | | | CACUUCUU | | | fAfAfAmAmGmCmAmCmUm |
| | | | | | | UmCmUpsmU |
| | 184 | Anti- | AAGAAGUGCUUUU | | 529 | vmApsfApsmGmAmAfGmUmG |
| | | Sense | GUGAUCCAUU | | | mCmUmUmUmUfGmUfGmAm |
| | | | | | | UmCmCmApsmUpsmU |

mX = 2′-O-methyl nucleotide; fX = 2′-fluoro nucleotide; v = 5′ vinyl phosphonate; vmX = 5′ vinyl phosphonate 2′-O-methyl nucleotide; ps = phosphorothioate linkage.

TABLE 9
21-mers with 3′-GalNAc in S and 5′-VP in AS

| | SEQ | Sense/ | | | SEQ | |
|---|---|---|---|---|---|---|
| | ID | Anti- | | | ID | |
| D# | NO. | sense | Base Sequence (5′-3′) | MD# | NO. | Modified Sequence (5′-3′) |
| 85 | 85 | Sense | UGGAGUCGUUGGU | 85 | 400 | mUpsmGpsmGmAmGmUfCmG |
| | | | GAAGUUUU | | | fUfUfGmGmUmGmAmAmGm |
| | | | | | | UmUmUpsmU-p-ps2-GalNAc4 |
| | 185 | Anti- | AAAACUUCACCAA | | 530 | vmApsfApsmAmAmCfUmUmC |
| | | sense | CGACUCCAUU | | | mAmCmCmAmAfCmGfAmCm |
| | | | | | | UmCmCmApsmUpsmU |
| 86 | 86 | Sense | UAUUGGUUCUGUG | 86 | 401 | mUpsmApsmUmUmGmGfUmU |
| | | | GGAUAUUA | | | fCfUfGmUmGmGmGmAmUm |
| | | | | | | AmUmUpsmA-p-ps2-GalNAc4 |
| | 186 | Anti- | UAAUAUCCCACAG | | 531 | vmUpsfApsmAmUmAfUmCmC |
| | | sense | AACCAAUAUU | | | mCmAmCmAmGfAmAfCmCm |
| | | | | | | AmAmUmApsmUpsmU |
| 87 | 87 | Sense | CUAGGACAUUUUU | 87 | 402 | mCpsmUpsmAmGmGmAfCmA |
| | | | GGAUCACA | | | fUfUfUmUmUmGmGmAmUm |
| | | | | | | CmAmCpsmA-p-ps2-GalNAc4 |
| | 187 | Anti- | UGUGAUCCAAAAA | | 532 | vmUpsfGpsmUmGmAfUmCmC |
| | | sense | UGUCCUAGUU | | | mAmAmAmAmAfUmGfUmCm |
| | | | | | | CmUmAmGpsmUpsmU |
| 88 | 88 | Sense | UUGGGAAAAACUG | 88 | 403 | mUpsmUpsmGmGmGmAfAmA |
| | | | GUAUCAAA | | | fAfAfCmUmGmGmUmAmUm |
| | | | | | | CmAmApsmA-p-ps2-GalNAc4 |
| | 188 | Anti- | UUUGAUACCAGUU | | 533 | vmUpsfUpsmUmGmAfUmAmC |
| | | sense | UUUCCCAAUU | | | mCmAmGmUmUfUmUfUmCm |
| | | | | | | CmCmAmApsmUpsmU |

mX = 2′-O-methyl nucleotide; fX = 2′-fluoro nucleotide; v = 5′ vinyl phosphonate; vmX = 5′ vinyl phosphonate 2′-O-methyl nucleotide; ps = phosphorothioate linkage.

TABLE 10
21-mers with 5′-VP in AS (continued from Table 4)

| | SEQ | Sense/ | | | SEQ | |
|---|---|---|---|---|---|---|
| | ID | Anti- | Base Sequence | | ID | |
| D# | NO. | sense | (5′-3′) | MD# | NO. | Modified Sequence (5′-3′) |
| 89 | 89 | Sense | CCUUACCUCAUC | 89 | 404 | mCpsmCpsmUmUmAmCfCm |
| | | | CCAUAUUGU | | | UfCfAfUmCmCmCmAmUmA |
| | | | | | | mUmUmGpsmU |
| | 189 | Anti- | ACAAUAUGGGAU | | 534 | vmApsfCpsmAmAmUfAmUm |
| | | Sense | GAGGUAAGGUU | | | GmGmGmAmUmGfAmGfGm |
| | | | | | | UmAmAmGmGpsmUpsmU |
| 90 | 90 | Sense | CCCAUAUUGUUC | 90 | 405 | mCpsmCpsmCmAmUmAfUm |
| | | | CAGCAAAUU | | | UfGfUfUmCmCmAmGmCmA |
| | | | | | | mAmAmUpsmU |
| | 190 | Anti- | AAUUUGCUGGAA | | 535 | vmApsfApsmUmUmUfGmCm |
| | | Sense | CAAUAUGGGUU | | | UmGmGmAmAmCfAmAfUm |
| | | | | | | AmUmGmGmGpsmUpsmU |
| 91 | 91 | Sense | CCUUGGGAAAAA | 91 | 406 | mCpsmCpsmUmUmGmGfGm |
| | | | CUGGUAUCA | | | AfAfAfAmAmCmUmGmGmU |
| | | | | | | mAmUmCpsmA |
| | 191 | Anti- | UGAUACCAGUUU | | 536 | vmUpsfGpsmAmUmAfCmCm |
| | | Sense | UUCCCAAGGUU | | | AmGmUmUmUmUfUmCfCm |
| | | | | | | CmAmAmGmGpsmUpsmU |
| 92 | 92 | Sense | UGGUAUCAAAAC | 92 | 407 | mUpsmGpsmGmUmAmUfCm |
| | | | CUCAUGUCU | | | AfAfAfAmCmCmUmCmAmU |
| | | | | | | mGmUmCpsmU |
| | 192 | Anti- | AGACAUGAGGUU | | 537 | vmApsfGpsmAmCmAfUmGm |
| | | Sense | UUGAUACCAUU | | | AmGmGmUmUmUfUmGfAm |
| | | | | | | UmAmCmCmApsmUpsmU |
| 93 | 93 | Sense | GUAUCAAAACCU | 93 | 408 | mGpsmUpsmAmUmCmAfAm |
| | | | CAUGUCUCU | | | AfAfCfCmUmCmAmUmGmU |
| | | | | | | mCmUmCpsmU |
| | 193 | Anti- | AGAGACAUGAGG | | 538 | vmApsfGpsmAmGmAfCmAm |
| | | Sense | UUUUGAUACUU | | | UmGmAmGmGmUfUmUfUm |
| | | | | | | GmAmUmAmCpsmUpsmU |
| 94 | 94 | Sense | UUGUGAAUACUG | 94 | 409 | mUpsmUpsmGmUmGmAfAm |
| | | | GGUUCACCA | | | UfAfCfUmGmGmGmUmUmC |
| | | | | | | mAmCmCpsmA |
| | 194 | Anti- | UGGUGAACCCAG | | 539 | vmUpsfGpsmGmUmGfAmAm |
| | | Sense | UAUUCACAAUU | | | CmCmCmAmGmUfAmUfUm |
| | | | | | | CmAmCmAmApsmUpsmU |
| 95 | 95 | Sense | UGUGAAUACUGG | 95 | 410 | mUpsmGpsmUmGmAmAfUm |
| | | | GUUCACCAA | | | AfCfUfGmGmGmUmUmCmA |
| | | | | | | mCmCmApsmA |
| | 195 | Anti- | UUGGUGAACCCA | | 540 | vmUpsfUpsmGmGmUfGmAm |
| | | Sense | GUAUUCACAUU | | | AmCmCmCmAmGfUmAfUm |
| | | | | | | UmCmAmCmApsmUpsmU |
| 96 | 96 | Sense | GUGAAUACUGGG | 96 | 411 | mGpsmUpsmGmAmAmUfAm |
| | | | UUCACCAAA | | | CfUfGfGmGmUmUmCmAmC |
| | | | | | | mCmAmApsmA |
| | 196 | Anti- | UUUGGUGAACCC | | 541 | vmUpsfUpsmUmGmGfUmGm |
| | | Sense | AGUAUUCACUU | | | AmAmCmCmCmAfGmUfAm |
| | | | | | | UmUmCmAmCpsmUpsmU |
| 97 | 97 | Sense | UGAAUACUGGGU | 97 | 412 | mUpsmGpsmAmAmUmAfCm |
| | | | UCACCAAAA | | | UfGfGfGmUmUmCmAmCmC |
| | | | | | | mAmAmApsmA |
| | 197 | Anti- | UUUUGGUGAACC | | 542 | vmUpsfUpsmUmUmGfGmUm |
| | | Sense | CAGUAUUCAUU | | | GmAmAmCmCmCfAmGfUm |
| | | | | | | AmUmUmCmApsmUpsmU |
| 98 | 98 | Sense | CCAAAAAUCCAA | 98 | 413 | mCpsmCpsmAmAmAmAfAm |
| | | | GCACAAGAU | | | UfCfCfAmAmGmCmAmCmA |
| | | | | | | mAmGmApsmU |
| | 198 | Anti- | AUCUUGUGCUUG | | 543 | vmApsfUpsmCmUmUfGmUm |
| | | Sense | GAUUUUUGGUU | | | GmCmUmUmGmGfAmUfUm |
| | | | | | | UmUmUmGmGpsmUpsmU |
| 99 | 99 | Sense | GGAAUACUUACC | 99 | 414 | mGpsmGpsmAmAmUmAfCm |
| | | | AAUAAGAAA | | | UfUfAfCmCmAmAmUmAmA |
| | | | | | | mGmAmApsmA |
| | 199 | Anti- | UUUCUUAUUGGU | | 544 | vmUpsfUpsmUmCmUfUmAm |
| | | Sense | AAGUAUUCCUU | | | UmUmGmGmUmAfAmGfUm |
| | | | | | | AmUmUmCmCpsmUpsmU |
| 100 | 100 | Sense | UAGGACAUUUUU | 100 | 415 | mUpsmApsmGmGmAmCfAm |
| | | | GGAUCACAA | | | UfUfUfUmUmGmGmAmUmC |
| | | | | | | mAmCmApsmA |
| | 200 | Anti- | UUGUGAUCCAAA | | 545 | vmUpsfUpsmGmUmGfAmUm |
| | | Sense | AAUGUCCUAUU | | | CmCmAmAmAmAfAmUfGm |
| | | | | | | UmCmCmUmApsmUpsmU |

mX = 2′-O-methyl nucleotide; fX = 2′-fluoro nucleotide; v = 5′ vinyl phosphonate; vmX = 5′ vinyl phosphonate 2′-O-methyl nucleotide; ps = phosphorothioate linkage.

TABLE 11
21-mers without 5′-VP

| | SEQ | Sense/ | | | SEQ | |
|---|---|---|---|---|---|---|
| | ID | Anti- | Base Sequence | | ID | |
| D# | NO. | sense | (5′-3′) | MD# | NO. | Modified Sequence (5′-3′) |
| 101 | 201 | Sense | CUUGGAGUCGUUG | 101 | 416 | mCpsmUpsmUmGmGmAfGmU |
| | | | GUGAAGUU | | | fCfGfUmUmGmGmUmGmAm |
| | | | | | | AmGmUpsmU |
| | 231 | Anti- | AACUUCACCAACG | | 546 | mApsfApsmCmUmUfCmAmC |
| | | Sense | ACUCCAAGUU | | | mCmAmAmCmGfAmCfUmCm |
| | | | | | | CmAmAmGpsmUpsmU |
| 102 | 202 | Sense | UGGAGUCGUUGGU | 102 | 417 | mUpsmGpsmGmAmGmUfCmG |
| | | | GAAGUUUU | | | fUfUfGmGmUmGmAmAmGm |
| | | | | | | UmUmUpsmU |
| | 232 | Anti- | AAAACUUCACCAA | | 547 | mApsfApsmAmAmCfUmUmC |
| | | Sense | CGACUCCAUU | | | mAmCmCmAmAfCmGfAmCm |
| | | | | | | UmCmCmApsmUpsmU |
| 103 | 203 | Sense | UUGGUGAAGUUUU | 103 | 418 | mUpsmUpsmGmGmUmGfAmA |
| | | | UCAUUCCU | | | fGfUfUmUmUmUmCmAmUm |
| | | | | | | UmCmCpsmU |
| | 233 | Anti- | AGGAAUGAAAAAC | | 548 | mApsfGpsmGmAmAfUmGmA |
| | | Sense | UUCACCAAUU | | | mAmAmAmAmCfUmUfCmAm |
| | | | | | | CmCmAmApsmUpsmU |
| 104 | 204 | Sense | GGUGAAGUUUUUC | 104 | 419 | mGpsmGpsmUmGmAmAfGmU |
| | | | AUUCCUCA | | | fUfUfUmUmCmAmUmUmCm |
| | | | | | | CmUmCpsmA |
| | 234 | Anti- | UGAGGAAUGAAAA | | 549 | mUpsfGpsmAmGmGfAmAmU |
| | | Sense | ACUUCACCUU | | | mGmAmAmAmAfAmCfUmUm |
| | | | | | | CmAmCmCpsmUpsmU |
| 105 | 205 | Sense | GGCAGGCAGACUA | 105 | 420 | mGpsmGpsmCmAmGmGfCmA |
| | | | CUUAUGAA | | | fGfAfCmUmAmCmUmUmAm |
| | | | | | | UmGmApsmA |
| | 235 | Anti- | UUCAUAAGUAGUC | | 550 | mUpsfUpsmCmAmUfAmAmG |
| | | Sense | UGCCUGCCUU | | | mUmAmGmUmCfUmGfCmCm |
| | | | | | | UmGmCmCpsmUpsmU |
| 106 | 206 | Sense | UAUUGGUUCUGUG | 106 | 421 | mUpsmApsmUmUmGmGfUmU |
| | | | GGAUAUUA | | | fCfUfGmUmGmGmGmAmUm |
| | | | | | | AmUmUpsmA |
| | 236 | Anti- | UAAUAUCCCACAG | | 551 | mUpsfApsmAmUmAfUmCmC |
| | | Sense | AACCAAUAUU | | | mCmAmCmAmGfAmAfCmCm |
| | | | | | | AmAmUmApsmUpsmU |
| 107 | 207 | Sense | GGUUCUGUGGGAU | 107 | 422 | mGpsmGpsmUmUmCmUfGmU |
| | | | AUUAAUAA | | | fGfGfGmAmUmAmUmUmAm |
| | | | | | | AmUmApsmA |
| | 237 | Anti- | UUAUUAAUAUCCC | | 552 | mUpsfUpsmAmUmUfAmAmU |
| | | Sense | ACAGAACCUU | | | mAmUmCmCmCfAmCfAmGm |
| | | | | | | AmAmCmCpsmUpsmU |
| 108 | 208 | Sense | CCAAGGAUGAAGA | 108 | 423 | mCpsmCpsmAmAmGmGfAmU |
| | | | GAUUACCA | | | fGfAfAmGmAmGmAmUmUm |
| | | | | | | AmCmCpsmA |
| | 238 | Anti- | UGGUAAUCUCUUC | | 553 | mUpsfGpsmGmUmAfAmUmC |
| | | Sense | AUCCUUGGUU | | | mUmCmUmUmCfAmUfCmCm |
| | | | | | | UmUmGmGpsmUpsmU |
| 109 | 209 | Sense | GAAGAGAUUACCA | 109 | 424 | mGpsmApsmAmGmAmGfAmU |
| | | | AGACAUUU | | | fUfAfCmCmAmAmGmAmCm |
| | | | | | | AmUmUpsmU |
| | 239 | Anti- | AAAUGUCUUGGUA | | 554 | mApsfApsmAmUmGfUmCmU |
| | | Sense | AUCUCUUCUU | | | mUmGmGmUmAfAmUfCmUm |
| | | | | | | CmUmUmCpsmUpsmU |
| 110 | 210 | Sense | AGAGAUUACCAAG | 110 | 425 | mApsmGpsmAmGmAmUfUmA |
| | | | ACAUUUGA | | | fCfCfAmAmGmAmCmAmUm |
| | | | | | | UmUmGpsmA |
| | 240 | Anti- | UCAAAUGUCUUGG | | 555 | mUpsfCpsmAmAmAfUmGmU |
| | | Sense | UAAUCUCUUU | | | mCmUmUmGmGfUmAfAmUm |
| | | | | | | CmUmCmUpsmUpsmU |
| 111 | 211 | Sense | GAUUACCAAGACA | 111 | 426 | mGpsmApsmUmUmAmCfCmA |
| | | | UUUGAGGU | | | fAfGfAmCmAmUmUmUmGm |
| | | | | | | AmGmGpsmU |
| | 241 | Anti- | ACCUCAAAUGUCU | | 556 | mApsfCpsmCmUmCfAmAmA |
| | | Sense | UGGUAAUCUU | | | mUmGmUmCmUfUmGfGmUm |
| | | | | | | AmAmUmCpsmUpsmU |
| 112 | 212 | Sense | UACCAAGACAUUU | 112 | 427 | mUpsmApsmCmCmAmAfGmA |
| | | | GAGGUCAA | | | fCfAfUmUmUmGmAmGmGm |
| | | | | | | UmCmApsmA |
| | 242 | Anti- | UUGACCUCAAAUG | | 557 | mUpsfUpsmGmAmCfCmUmC |
| | | Sense | UCUUGGUAUU | | | mAmAmAmUmGfUmCfUmUm |
| | | | | | | GmGmUmApsmUpsmU |
| 113 | 213 | Sense | UCCUAGGACAUUU | 113 | 428 | mUpsmCpsmCmUmAmGfGmA |
| | | | UUGGAUCA | | | fCfAfUmUmUmUmUmGmGm |
| | | | | | | AmUmCpsmA |
| | 243 | Anti- | UGAUCCAAAAAUG | | 558 | mUpsfGpsmAmUmCfCmAmA |
| | | Sense | UCCUAGGAUU | | | mAmAmAmUmGfUmCfCmUm |
| | | | | | | AmGmGmApsmUpsmU |
| 114 | 214 | Sense | CUAGGACAUUUUU | 114 | 429 | mCpsmUpsmAmGmGmAfCmA |
| | | | GGAUCACA | | | fUfUfUmUmUmGmGmAmUm |
| | | | | | | CmAmCpsmA |
| | 244 | Anti- | UGUGAUCCAAAAA | | 559 | mUpsfGpsmUmGmAfUmCmC |
| | | Sense | UGUCCUAGUU | | | mAmAmAmAmAfUmGfUmCm |
| | | | | | | CmUmAmGpsmUpsmU |
| 115 | 215 | Sense | UUUUUGGAUCACA | 115 | 430 | mUpsmUpsmUmUmUmGfGmA |
| | | | AAAGCACU | | | fUfCfAmCmAmAmAmAmGm |
| | | | | | | CmAmCpsmU |
| | 245 | Anti- | AGUGCUUUUGUGA | | 560 | mApsfGpsmUmGmCfUmUmU |
| | | Sense | UCCAAAAAUU | | | mUmGmUmGmAfUmCfCmAm |
| | | | | | | AmAmAmApsmUpsmU |
| 116 | 216 | Sense | UGGAUCACAAAAG | 116 | 431 | mUpsmGpsmGmAmUmCfAmC |
| | | | CACUUCUU | | | fAfAfAmAmGmCmAmCmUm |
| | | | | | | UmCmUpsmU |
| | 246 | Anti- | AAGAAGUGCUUUU | | 561 | mApsfApsmGmAmAfGmUmG |
| | | Sense | GUGAUCCAUU | | | mCmUmUmUmUfGmUfGmAm |
| | | | | | | UmCmCmApsmUpsmU |
| 117 | 217 | Sense | UUGGGAAAAACUG | 117 | 432 | mUpsmUpsmGmGmGmAfAmA |
| | | | GUAUCAAA | | | fAfAfCmUmGmGmUmAmUm |
| | | | | | | CmAmApsmA |
| | 247 | Anti- | UUUGAUACCAGUU | | 562 | mUpsfUpsmUmGmAfUmAmC |
| | | Sense | UUUCCCAAUU | | | mCmAmGmUmUfUmUfUmCm |
| | | | | | | CmCmAmApsmUpsmU |
| 118 | 218 | Sense | AAAACUGGUAUCA | 118 | 433 | mApsmApsmAmAmCmUfGmG |
| | | | AAACCUCA | | | fUfAfUmCmAmAmAmAmCm |
| | | | | | | CmUmCpsmA |
| | 248 | Anti- | UGAGGUUUUGAUA | | 563 | mUpsfGpsmAmGmGfUmUmU |
| | | Sense | CCAGUUUUUU | | | mUmGmAmUmAfCmCfAmGm |
| | | | | | | UmUmUmUpsmUpsmU |
| 119 | 219 | Sense | UGAAGUCGUAAGA | 119 | 434 | mUpsmGpsmAmAmGmUfCmG |
| | | | AGUCUGAU | | | fUfAfAmGmAmAmGmUmCm |
| | | | | | | UmGmApsmU |
| | 249 | Anti- | AUCAGACUUCUUA | | 564 | mApsfUpsmCmAmGfAmCmU |
| | | Sense | CGACUUCAUU | | | mUmCmUmUmAfCmGfAmCm |
| | | | | | | UmUmCmApsmUpsmU |
| 120 | 220 | Sense | AGUCUGAUAGAUG | 120 | 435 | mApsmGpsmUmCmUmGfAmU |
| | | | GAAUACUU | | | fAfGfAmUmGmGmAmAmUm |
| | | | | | | AmCmUpsmU |
| | 250 | Anti- | AAGUAUUCCAUCU | | 565 | mApsfApsmGmUmAfUmUmC |
| | | Sense | AUCAGACUUU | | | mCmAmUmCmUfAmUfCmAm |
| | | | | | | GmAmCmUpsmUpsmU |
| 121 | 221 | Sense | GUCUGAUAGAUGG | 121 | 436 | mGpsmUpsmCmUmGmAfUmA |
| | | | AAUACUUA | | | fGfAfUmGmGmAmAmUmAm |
| | | | | | | CmUmUpsmA |
| | 251 | Anti- | UAAGUAUUCCAUC | | 566 | mUpsfApsmAmGmUfAmUmU |
| | | Sense | UAUCAGACUU | | | mCmCmAmUmCfUmAfUmCm |
| | | | | | | AmGmAmCpsmUpsmU |
| 122 | 222 | Sense | AGAUGGAAUACUU | 122 | 437 | mApsmGpsmAmUmGmGfAmA |
| | | | ACCAAUAA | | | fUfAfCmUmUmAmCmCmAm |
| | | | | | | AmUmApsmA |
| | 252 | Anti- | UUAUUGGUAAGUA | | 567 | mUpsfUpsmAmUmUfGmGmU |
| | | Sense | UUCCAUCUUU | | | mAmAmGmUmAfUmUfCmCm |
| | | | | | | AmUmCmUpsmUpsmU |
| 123 | 223 | Sense | UGGAAUACUUACC | 123 | 438 | mUpsmGpsmGmAmAmUfAmC |
| | | | AAUAAGAA | | | fUfUfAmCmCmAmAmUmAm |
| | | | | | | AmGmApsmA |
| | 253 | Anti- | UUCUUAUUGGUAA | | 568 | mUpsfUpsmCmUmUfAmUmU |
| | | Sense | GUAUUCCAUU | | | mGmGmUmAmAfGmUfAmUm |
| | | | | | | UmCmCmApsmUpsmU |
| 124 | 224 | Sense | ACUUACCAAUAAG | 124 | 439 | mApsmCpsmUmUmAmCfCmA |
| | | | AAAAUGAU | | | fAfUfAmAmGmAmAmAmAm |
| | | | | | | UmGmApsmU |
| | 254 | Anti- | AUCAUUUUCUUAU | | 569 | mApsfUpsmCmAmUfUmUmU |
| | | Sense | UGGUAAGUUU | | | mCmUmUmAmUfUmGfGmUm |
| | | | | | | AmAmGmUpsmUpsmU |
| 125 | 225 | Sense | CUUACCAAUAAGA | 125 | 440 | mCpsmUpsmUmAmCmCfAmA |
| | | | AAAUGAUU | | | fUfAfAmGmAmAmAmAmUm |
| | | | | | | GmAmUpsmU |
| | 255 | Anti- | AAUCAUUUUCUUA | | 570 | mApsfApsmUmCmAfUmUmU |
| | | Sense | UUGGUAAGUU | | | mUmCmUmUmAfUmUfGmGm |
| | | | | | | UmAmAmGpsmUpsmU |
| 126 | 226 | Sense | ACCAAUAAGAAAA | 126 | 441 | mApsmCpsmCmAmAmUfAmA |
| | | | UGAUUUUU | | | fGfAfAmAmAmUmGmAmUm |
| | | | | | | UmUmUpsmU |
| | 256 | Anti- | AAAAAUCAUUUUC | | 571 | mApsfApsmAmAmAfUmCmA |
| | | Sense | UUAUUGGUUU | | | mUmUmUmUmCfUmUfAmUm |
| | | | | | | UmGmGmUpsmUpsmU |
| 127 | 227 | Sense | AAGAAAAUGAUUU | 127 | 442 | mApsmApsmGmAmAmAfAmU |
| | | | UUGUUCCA | | | fGfAfUmUmUmUmUmGmUm |
| | | | | | | UmCmCpsmA |
| | 257 | Anti- | UGGAACAAAAAUC | | 572 | mUpsfGpsmGmAmAfCmAmA |
| | | Sense | AUUUUCUUUU | | | mAmAmAmUmCfAmUfUmUm |
| | | | | | | UmCmUmUpsmUpsmU |
| 128 | 228 | Sense | AAUGAUUUUUGUU | 128 | 443 | mApsmApsmUmGmAmUfUmU |
| | | | CCAUCGUA | | | fUfUfGmUmUmCmCmAmUm |
| | | | | | | CmGmUpsmA |
| | 258 | Anti- | UACGAUGGAACAA | | 573 | mUpsfApsmCmGmAfUmGmG |
| | | Sense | AAAUCAUUUU | | | mAmAmCmAmAfAmAfAmUm |
| | | | | | | CmAmUmUpsmUpsmU |
| 129 | 229 | Sense | AUGAUUUUUGUUC | 129 | 444 | mApsmUpsmGmAmUmUfUmU |
| | | | CAUCGUAU | | | fUfGfUmUmCmCmAmUmCm |
| | | | | | | GmUmApsmU |
| | 259 | Anti- | AUACGAUGGAACA | | 574 | mApsfUpsmAmCmGfAmUmG |
| | | Sense | AAAAUCAUUU | | | mGmAmAmCmAfAmAfAmAm |
| | | | | | | UmCmAmUpsmUpsmU |
| 130 | 230 | Sense | UUUUGUUCCAUCG | 130 | 445 | mUpsmUpsmUmUmGmUfUmC |
| | | | UAUAUCAA | | | fCfAfUmCmGmUmAmUmAm |
| | | | | | | UmCmApsmA |
| | 260 | Anti- | UUGAUAUACGAUG | | 575 | mUpsfUpsmGmAmUfAmUmA |
| | | Sense | GAACAAAAUU | | | mCmGmAmUmGfGmAfAmCm |
| | | | | | | AmAmAmApsmUpsmU |

mX = 2′-O-methyl nucleotide; fX = 2′-fluoro nucleotide; ps = phosphorothioate linkage.

TABLE 12
GalNAc conjugated siRNAs

| | SEQ | Sense/ | | | SEQ | |
|---|---|---|---|---|---|---|
| | ID | Anti- | Base Sequence | | ID | |
| D# | NO. | sense | (5′-3′) | MD# | NO. | Modified Sequence (5′-3′) |
| 131 | 262 | Sense | CUUGGAGUCGUUG | 131 | 576 | mCpsmUpsmUmGmGmAfGmU |
| | | | GUGAAGUU | | | fCfGfUmUmGmGmUmGmAm |
| | | | | | | AmGmUpsmU- |
| | | | | | | GalNAc4psGalNAc4psGalNAc4 |
| | 288 | Anti- | AACUUCACCAACG | | 604 | mApsfApsmCmUmUfCmAmC |
| | | Sense | ACUCCAAGUU | | | mCmAmAmCmGfAmCfUmCm |
| | | | | | | CmAmAmGpsmUpsmU |
| 132 | 263 | Sense | UGGAGUCGUUGGU | 132 | 577 | mUpsmGpsmGmAfGmUfCfGfU |
| | | | GAAGUU | | | mUmGmGmUmGmAmAmGm |
| | | | | | | UmU- |
| | | | | | | GalNAc4psGalNAc4psGalNAc4 |
| | 289 | Anti- | AACUUCACCAACG | | 605 | vmApsfApsmCmUmUfCmAmC |
| | | Sense | ACUCCAAG | | | mCmAmAmCmGfAmCfUmCm |
| | | | | | | CmApsmApsmG |
| 133 | 264 | Sense | UGGAGUCGUUGGU | 133 | 578 | mUpsmGpsmGmAfGmUfCfGfU |
| | | | GAAGUU | | | mUmGmGmUmGmAmAmGm |
| | | | | | | UmU- |
| | | | | | | GalNAc4psGalNAc4psGalNAc4 |
| | 290 | Anti- | AACUUCACCAACG | | 606 | mApsfApsmCmUmUfCmAmC |
| | | Sense | ACUCCAAG | | | mCmAmAmCmGfAmCfUmCm |
| | | | | | | CmApsmApsmG |
| 134 | 265 | Sense | CUUGGAGUCGUUG | 134 | 579 | mCpsmUpsmUmGmGmAfGmU |
| | | | GUGAAGUU | | | fCfGfUmUmGmGmUmGmAm |
| | | | | | | AmGmUmU- |
| | | | | | | GalNAc4psGalNAc4psGalNAc4 |
| | 291 | Anti- | AACUUCACCAACG | | 607 | vmApsfApsmCmUmUfCmAmC |
| | | Sense | ACUCCAAGUA | | | mCmAmAmCmGfAmCfUmCm |
| | | | | | | CmAmAmGpsmUpsmA |
| 135 | 266 | Sense | CUUGGAGUCGUUG | 135 | 580 | mCpsmUpsmUmGmGmAfGmU |
| | | | GUGAAGUU | | | fCfGfUmUmGmGmUmGmAm |
| | | | | | | AmGmUmU- |
| | | | | | | GalNAc4psGalNAc4psGalNAc4 |
| | 292 | Anti- | AACUUCACCAACG | | 608 | mApsfApsmCmUmUfCmAmC |
| | | Sense | ACUCCAAGUA | | | mCmAmAmCmGfAmCfUmCm |
| | | | | | | CmAmAmGpsmUpsmA |
| 136 | 267 | Sense | UGGAGUCGUUGGU | 136 | 581 | mUpsmGpsmGmAmGmUfCmG |
| | | | GAAGUUUU | | | fUfUfGmGmUmGmAmAmGm |
| | | | | | | UmUmUpsmU- |
| | | | | | | GalNAc4psGalNAc4psGalNAc4 |
| | 293 | Anti- | AAAACUUCACCAA | | 609 | mApsfApsmAmAmCfUmUmC |
| | | Sense | CGACUCCAUU | | | mAmCmCmAmAfCmGfAmCm |
| | | | | | | UmCmCmApsmUpsmU |
| 137 | 268 | Sense | GGUGAAGUUUUUC | 137 | 582 | mGpsmGpsmUmGfAmAfGfUf |
| | | | AUUCCU | | | UmUmUmUmCmAmUmUmCm |
| | | | | | | CmU- |
| | | | | | | GalNAc4psGalNAc4psGalNAc4 |
| | 294 | Anti- | AGGAAUGAAAAAC | | 610 | vmApsfGpsmGmAmAfUmGmA |
| | | Sense | UUCACCAA | | | mAmAmAmAmCfUmUfCmAm |
| | | | | | | CmCpsmApsmA |
| 138 | 269 | Sense | GGUGAAGUUUUUC | 138 | 583 | mGpsmGpsmUmGfAmAfGfUf |
| | | | AUUCCU | | | UmUmUmUmCmAmUmUmCm |
| | | | | | | CmU- |
| | | | | | | GalNAc4psGalNAc4psGalNAc4 |
| | 295 | Anti- | AGGAAUGAAAAAC | | 611 | mApsfGpsmGmAmAfUmGmA |
| | | Sense | UUCACCAA | | | mAmAmAmAmCfUmUfCmAm |
| | | | | | | CmCpsmApsmA |
| 139 | 270 | Sense | UUGGUGAAGUUUU | 139 | 584 | mUpsmUpsmGmGmUmGfAmA |
| | | | UCAUUCCU | | | fGfUfUmUmUmUmCmAmUm |
| | | | | | | UmCmCmU- |
| | | | | | | GalNAc4psGalNAc4psGalNAc4 |
| | 296 | Anti- | AGGAAUGAAAAAC | | 612 | vmApsfGpsmGmAmAfUmGmA |
| | | Sense | UUCACCAACG | | | mAmAmAmAmCfUmUfCmAm |
| | | | | | | CmCmAmApsmCpsmG |
| 140 | 271 | Sense | UUGGUGAAGUUUU | 140 | 585 | mUpsmUpsmGmGmUmGfAmA |
| | | | UCAUUCCU | | | fGfUfUmUmUmUmCmAmUm |
| | | | | | | UmCmCmU- |
| | | | | | | GalNAc4psGalNAc4psGalNAc4 |
| | 297 | Anti- | AGGAAUGAAAAAC | | 613 | mApsfGpsmGmAmAfUmGmA |
| | | Sense | UUCACCAACG | | | mAmAmAmAmCfUmUfCmAm |
| | | | | | | CmCmAmApsmCpsmG |
| 141 | 272 | Sense | UAUUGGUUCUGUG | 141 | 586 | mUpsmApsmUmUmGmGfUmU |
| | | | GGAUAUUA | | | fCfUfGmUmGmGmGmAmUm |
| | | | | | | AmUmUmA- |
| | | | | | | GalNAc4psGalNAc4psGalNAc4 |
| | 298 | Anti- | UAAUAUCCCACAG | | 614 | mUpsfApsmAmUmAfUmCmC |
| | | Sense | AACCAAUAUG | | | mCmAmCmAmGfAmAfCmCm |
| | | | | | | AmAmUmApsmUpsmG |
| 142 | 273 | Sense | UAUUGGUUCUGUG | 142 | 587 | mUpsmApsmUmUmGmGfUmU |
| | | | GGAUAUUA | | | fCfUfGmUmGmGmGmAmUm |
| | | | | | | AmUmUmA- |
| | | | | | | GalNAc4psGalNAc4psGalNAc4 |
| | 299 | Anti- | UAAUAUCCCACAG | | 615 | vmUpsfApsmAmUmAfUmCmC |
| | | Sense | AACCAAUAUG | | | mCmAmCmAmGfAmAfCmCm |
| | | | | | | AmAmUmApsmUpsmG |
| 143 | 274 | Sense | UAUUGGUUCUGUG | 143 | 588 | mUpsmApsmUmUmGmGfUmU |
| | | | GGAUAUUA | | | fCfUfGmUmGmGmGmAmUm |
| | | | | | | AmUmUmA- |
| | | | | | | GalNAc4psGalNAc4psGalNAc4 |
| | 300 | Anti- | AAAUAUCCCACAG | | 616 | vmApsfApsmAmUmAfUmCmC |
| | | Sense | AACCAAUAUG | | | mCmAmCmAmGfAmAfCmCm |
| | | | | | | AmAmUmApsmUpsmG |
| 144 | 275 | Sense | UUGGGAAAAACUG | 144 | 589 | mUpsmUpsmGmGmGmAfAmA |
| | | | GUAUCAAA | | | fAfAfCmUmGmGmUmAmUm |
| | | | | | | CmAmAmA- |
| | | | | | | GalNAc4psGalNAc4psGalNAc4 |
| | 301 | Anti- | UUUGAUACCAGUU | | 617 | mUpsfUpsmUmGmAfUmAmC |
| | | Sense | UUUCCCAAGG | | | mCmAmGmUmUfUmUfUmCm |
| | | | | | | CmCmAmApsmGpsmG |
| 145 | 276 | Sense | UUGGGAAAAACUG | 145 | 590 | mUpsmUpsmGmGmGmAfAmA |
| | | | GUAUCAAA | | | fAfAfCmUmGmGmUmAmUm |
| | | | | | | CmAmAmA- |
| | | | | | | GalNAc4psGalNAc4psGalNAc4 |
| | 302 | Anti- | UUUGAUACCAGUU | | 618 | vmUpsfUpsmUmGmAfUmAmC |
| | | Sense | UUUCCCAAGG | | | mCmAmGmUmUfUmUfUmCm |
| | | | | | | CmCmAmApsmGpsmG |
| 146 | 277 | Sense | UUGGGAAAAACUG | 146 | 591 | mUpsmUpsmGmGmGmAfAmA |
| | | | GUAUCAAA | | | fAfAfCmUmGmGmUmAmUm |
| | | | | | | CmAmAmA- |
| | | | | | | GalNAc4psGalNAc4psGalNAc4 |
| | 303 | Anti- | AUUGAUACCAGUU | | 619 | vmApsfUpsmUmGmAfUmAmC |
| | | Sense | UUUCCCAAGG | | | mCmAmGmUmUfUmUfUmCm |
| | | | | | | CmCmAmApsmGpsmG |
| 147 | 278 | Sense | ACCAAUAAGAAAA | 147 | 592 | mApsmCpsmCmAmAmUfAmA |
| | | | UGAUUUUU | | | fGfAfAmAmAmUmGmAmUm |
| | | | | | | UmUmUmU- |
| | | | | | | GalNAc4psGalNAc4psGalNAc4 |
| | 304 | Anti- | AAAAAUCAUUUUC | | 620 | mApsfApsmAmAmAfUmCmA |
| | | Sense | UUAUUGGUAA | | | mUmUmUmUmCfUmUfAmUm |
| | | | | | | UmGmGmUpsmApsmA |
| 148 | 279 | Sense | ACCAAUAAGAAAA | 148 | 593 | mApsmCpsmCmAmAmUfAmA |
| | | | UGAUUUUU | | | fGfAfAmAmAmUmGmAmUm |
| | | | | | | UmUmUmU- |
| | | | | | | GalNAc4psGalNAc4psGalNAc4 |
| | 305 | Anti- | AAAAAUCAUUUUC | | 621 | vmApsfApsmAmAmAfUmCmA |
| | | Sense | UUAUUGGUAA | | | mUmUmUmUmCfUmUfAmUm |
| | | | | | | UmGmGmUpsmApsmA |
| 149 | 280 | Sense | ACCAAUAAGAAAA | 149 | 594 | mApsmCpsmCmAmAmUfAmA |
| | | | UGAUUUUU | | | fGfAfAmAmAmUmGmAmUm |
| | | | | | | UmUmUmU- |
| | | | | | | GalNAc4psGalNAc4psGalNAc4 |
| | 306 | Anti- | UAAAAUCAUUUUC | | 622 | vmUpsfApsmAmAmAfUmCmA |
| | | Sense | UUAUUGGUAA | | | mUmUmUmUmCfUmUfAmUm |
| | | | | | | UmGmGmUpsmApsmA |
| 150 | 281 | Sense | UGGUAUCAAAACC | 150 | 595 | mUpsmGpsmGmUmAmUfCmA |
| | | | UCAUGUCU | | | fAfAfAmCmCmUmCmAmUm |
| | | | | | | GmUmCmU- |
| | | | | | | GalNAc4psGalNAc4psGalNAc4 |
| | 307 | Anti- | AGACAUGAGGUUU | | 623 | mApsfGpsmAmCmAfUmGmA |
| | | Sense | UGAUACCAUU | | | mGmGmUmUmUfUmGfAmUm |
| | | | | | | AmCmCmApsmUpsmU |
| 151 | 282 | Sense | UGGUAUCAAAACC | 151 | 596 | mUpsmGpsmGmUmAmUfCmA |
| | | | UCAUGUCU | | | fAfAfAmCmCmUmCmAmUm |
| | | | | | | GmUmCmU- |
| | | | | | | GalNAc4psGalNAc4psGalNAc4 |
| | 308 | Anti- | AGACAUGAGGUUU | | 624 | vmApsfGpsmAmCmAfUmGmA |
| | | Sense | UGAUACCAGU | | | mGmGmUmUmUfUmGfAmUm |
| | | | | | | AmCmCmApsmGpsmU |
| 152 | 283 | Sense | GUAUCAAAACCUC | 152 | 597 | mGpsmUpsmAmUmCmAfAmA |
| | | | AUGUCUCU | | | fAfCfCmUmCmAmUmGmUmC |
| | | | | | | mUmCmU- |
| | | | | | | GalNAc4psGalNAc4psGalNAc4 |
| | 309 | Anti- | AGAGACAUGAGGU | | 625 | mApsfGpsmAmGmAfCmAmU |
| | | Sense | UUUGAUACUU | | | mGmAmGmGmUfUmUfUmGm |
| | | | | | | AmUmAmCpsmUpsmU |
| 153 | 284 | Sense | GUAUCAAAACCUC | 153 | 598 | mGpsmUpsmAmUmCmAfAmA |
| | | | AUGUCUCU | | | fAfCfCmUmCmAmUmGmUmC |
| | | | | | | mUmCmU- |
| | | | | | | GalNAc4psGalNAc4psGalNAc4 |
| | 310 | Anti- | AGAGACAUGAGGU | | 626 | mApsfGpsmAmGmAfCmAmU |
| | | Sense | UUUGAUACCA | | | mGmAmGmGmUfUmUfUmGm |
| | | | | | | AmUmAmCpsmCpsmA |
| 154 | 285 | Sense | GUAUCAAAACCUC | 154 | 599 | mGpsmUpsmAmUmCmAfAmA |
| | | | AUGUCUCU | | | fAfCfCmUmCmAmUmGmUmC |
| | | | | | | mUmCmU- |
| | | | | | | GalNAc4psGalNAc4psGalNAc4 |
| | 311 | Anti- | AGAGACAUGAGGU | | 627 | vmApsfGpsmAmGmAfCmAmU |
| | | Sense | UUUGAUACCA | | | mGmAmGmGmUfUmUfUmGm |
| | | | | | | AmUmAmCpsmCpsmA |
| 155 | 286 | Sense | GUAUCAAAACCUC | 155 | 600 | mGpsmUpsmAmUmCmAfAmA |
| | | | AUGUCUCU | | | fAfCfCmUmCmAmUmGmUmC |
| | | | | | | mUmCmU- |
| | | | | | | GalNAc4psGalNAc4psGalNAc4 |
| | 312 | Anti- | UGAGACAUGAGGU | | 628 | vmUpsfGpsmAmGmAfCmAmU |
| | | Sense | UUUGAUACCA | | | mGmAmGmGmUfUmUfUmGm |
| | | | | | | AmUmAmCpsmCpsmA |
| 156 | 287 | Sense | UGAAGUCGUAAGA | 156 | 601 | mUpsmGpsmAmAmGmUfCmG |
| | | | AGUCUGAU | | | fUfAfAmGmAmAmGmUmCm |
| | | | | | | UmGmApsmU- |
| | | | | | | GalNAc4psGalNAc4psGalNAc4 |
| | 313 | Anti- | AUCAGACUUCUUA | | 629 | mApsfUpsmCmAmGfAmCmU |
| | | Sense | CGACUUCAUU | | | mUmCmUmUmAfCmGfAmCm |
| | | | | | | UmUmCmApsmUpsmU |
| 157 | 262 | Sense | CUUGGAGUCGUUG | 157 | 576 | mCpsmUpsmUmGmGmAfGmU |
| | | | GUGAAGUU | | | fCfGfUmUmGmGmUmGmAm |
| | | | | | | AmGmUpsmU- |
| | | | | | | GalNAc4psGalNAc4psGalNAc4 |
| | 105 | Anti- | AACUUCACCAACG | | 450 | vmApsfApsmCmUmUfCmAmC |
| | | Sense | ACUCCAAGUU | | | mCmAmAmCmGfAmCfUmCm |
| | | | | | | CmAmAmGpsmUpsmU |
| 158 | 287 | Sense | UGAAGUCGUAAGA | 158 | 601 | mUpsmGpsmAmAmGmUfCmG |
| | | | AGUCUGAU | | | fUfAfAmGmAmAmGmUmCm |
| | | | | | | UmGmApsmU- |
| | | | | | | GalNAc4psGalNAc4psGalNAc4 |
| | 156 | Anti- | AUCAGACUUCUUA | | 501 | vmApsfUpsmCmAmGfAmCmU |
| | | Sense | CGACUUCAUU | | | mUmCmUmUmAfCmGfAmCm |
| | | | | | | UmUmCmApsmUpsmU |
| 159 | 314 | Sense | UUGGUGAAGUUUU | 159 | 602 | mUpsmUpsmGmGmUmGfAmA |
| | | | UCAUUCCU | | | fGfUfUmUmUmUmCmAmUm |
| | | | | | | UmCmCpsmU- |
| | | | | | | GalNAc4psGalNAc4psGalNAc4 |
| | 107 | Anti- | AGGAAUGAAAAAC | | 452 | vmApsfGpsmGmAmAfUmGmA |
| | | Sense | UUCACCAAUU | | | mAmAmAmAmCfUmUfCmAm |
| | | | | | | CmCmAmApsmUpsmU |
| 160 | 315 | Sense | ACCAAUAAGAAAA | 160 | 603 | mApsmCpsmCmAmAmUfAmA |
| | | | UGAUUUUU | | | fGfAfAmAmAmUmGmAmUm |
| | | | | | | UmUmUpsmU- |
| | | | | | | GalNAc4psGalNAc4psGalNAc4 |
| | 171 | Anti- | AAAAAUCAUUUUC | | 516 | vmApsfApsmAmAmAfUmCmA |
| | | Sense | UUAUUGGUUU | | | mUmUmUmUmCfUmUfAmUm |
| | | | | | | UmGmGmUpsmUpsmU |
| 161 | 281 | Sense | UGGUAUCAAAACC | 161 | 595 | mUpsmGpsmGmUmAmUfCmA |
| | | | UCAUGUCU | | | fAfAfAmCmCmUmCmAmUm |
| | | | | | | GmUmCmU- |
| | | | | | | GalNAc4psGalNAc4psGalNAc4 |
| | 192 | Anti- | AGACAUGAGGUUU | | 537 | vmApsfGpsmAmCmAfUmGmA |
| | | Sense | UGAUACCAUU | | | mGmGmUmUmUfUmGfAmUm |
| | | | | | | AmCmCmApsmUpsmU |
| 162 | 286 | Sense | GUAUCAAAACCUC | 162 | 600 | mGpsmUpsmAmUmCmAfAmA |
| | | | AUGUCUCU | | | fAfCfCmUmCmAmUmGmUmC |
| | | | | | | mUmCmU- |
| | | | | | | GalNAc4psGalNAc4psGalNAc4 |
| | 193 | Anti- | AGAGACAUGAGGU | | 538 | vmApsfGpsmAmGmAfCmAmU |
| | | Sense | UUUGAUACCUU | | | mGmAmGmGmUfUmUfUmGm |
| | | | | | | AmUmAmCpsmUpsmU |
| 163 | 267 | Sense | UGGAGUCGUUGGU | 163 | 581 | mUpsmGpsmGmAmGmUfCmG |
| | | | GAAGUUUU | | | fUfUfGmGmUmGmAmAmGm |
| | | | | | | UmUmUpsmU- |
| | | | | | | GalNAc4psGalNAc4psGalNAc4 |
| | 106 | Anti- | AAAACUUCACCAA | | 451 | vmApsfApsmAmAmCfUmUmC |
| | | Sense | CGACUCCAUU | | | mAmCmCmAmAfCmGfAmCm |
| | | | | | | UmCmCmApsmUpsmU |
| 164 | 268 | Sense | GGUGAAGUUUUUC | 164 | 582 | mGpsmGpsmUmGfAmAfGfUf |
| | | | AUUCCU | | | UmUmUmUmCmAmUmUmCm |
| | | | | | | CmU- |
| | | | | | | GalNAc4psGalNAc4psGalNAc4 |
| | 295 | Anti- | AGGAAUGAAAAAC | | 630 | vmApsfGpsmGmAmAfUunGm |
| | | Sense | UUCACCAA | | | AmAmAmAmAmCfUmUfCmA |
| | | | | | | mCmCpsmApsmA |
| 165 | 268 | Sense | GGUGAAGUUUUUC | 165 | 582 | mGpsmGpsmUmGfAmAfGfUf |
| | | | AUUCCU | | | UmUmUmUmCmAmUmUmCm |
| | | | | | | CmU- |
| | | | | | | GalNAc4psGalNAc4psGalNAc4 |
| | 295 | Anti- | AGGAAUGAAAAAC | | 631 | vmApsfGpsmGmAmAfUmun34 |
| | | Sense | UUCACCAA | | | GmAmAmAmAmAmCfUmUfC |
| | | | | | | mAmCmCpsmApsmA |
| 166 | 268 | Sense | GGUGAAGUUUUUC | 166 | 582 | mGpsmGpsmUmGfAmAfGfUf |
| | | | AUUCCU | | | UmUmUmUmCmAmUmUmCm |
| | | | | | | CmU- |
| | | | | | | GalNAc4psGalNAc4psGalNAc4 |
| | 295 | Anti- | AGGAAUGAAAAAC | | 632 | v- |
| | | Sense | UUCACCAA | | | munUpsfGpsmGmAmAfUmGm |
| | | | | | | AmAmAmAmAmCfUmUfCmA |
| | | | | | | mCmCpsmApsmA |
| 167 | 268 | Sense | GGUGAAGUUUUUC | 167 | 582 | mGpsmGpsmUmGfAmAfGfUf |
| | | | AUUCCU | | | UmUmUmUmCmAmUmUmCm |
| | | | | | | CmU- |
| | | | | | | GalNAc4psGalNAc4psGalNAc4 |
| | 295 | Anti- | AGGAAUGAAAAAC | | 633 | 4hUpsfGpsmGmAmAfUmGmA |
| | | Sense | UUCACCAA | | | mAmAmAmAmCfUmUfCmAm |
| | | | | | | CmCpsmApsmA |
| 168 | 268 | Sense | GGUGAAGUUUUUC | 168 | 582 | mGpsmGpsmUmGfAmAfGfUf |
| | | | AUUCCU | | | UmUmUmUmCmAmUmUmCm |
| | | | | | | CmU- |
| | | | | | | GalNAc4psGalNAc4psGalNAc4 |
| | 295 | Anti- | AGGAAUGAAAAAC | | 634 | c2o- |
| | | Sense | UUCACCAA | | | 4hUpsfGpsmGmAmAfUmGmA |
| | | | | | | mAmAmAmAmCfUmUfCmAm |
| | | | | | | CmCpsmApsmA |
| 169 | 71 | Sense | ACCAAUAAGAAAA | 169 | 592 | mApsmCpsmCmAmAmUfAmA |
| | | | UGAUUUUU | | | fGfAfAmAmAmUmGmAmUm |
| | | | | | | UmUmUmU- |
| | | | | | | GalNAc4psGalNAc4psGalNAc4 |
| | 306 | Anti- | UAAAAUCAUUUUC | | 635 | v- |
| | | Sense | UUAUUGGUAA | | | munUpsfApsmAmAmAfUmCm |
| | | | | | | AmUmUmUmUmCfUmUfAmU |
| | | | | | | mUmGmGmUpsmApsmA |
| 170 | 71 | Sense | ACCAAUAAGAAAA | 170 | 592 | mApsmCpsmCmAmAmUfAmA |
| | | | UGAUUUUU | | | fGfAfAmAmAmUmGmAmUm |
| | | | | | | UmUmUmU- |
| | | | | | | GalNAc4psGalNAc4psGalNAc4 |
| | 306 | Anti- | UAAAAUCAUUUUC | | 636 | 4hUpsfApsmAmAmAfUmCmA |
| | | Sense | UUAUUGGUAA | | | mUmUmUmUmCfUmUfAmUm |
| | | | | | | UmGmGmUpsmApsmA |
| 171 | 71 | Sense | ACCAAUAAGAAAA | 171 | 592 | mApsmCpsmCmAmAmUfAmA |
| | | | UGAUUUUU | | | fGfAfAmAmAmUmGmAmUm |
| | | | | | | UmUmUmU- |
| | | | | | | GalNAc4psGalNAc4psGalNAc4 |
| | 306 | Anti- | UAAAAUCAUUUUC | | 637 | c2o- |
| | | Sense | UUAUUGGUAA | | | 4hUpsfApsmAmAmAfUmCmA |
| | | | | | | mUmUmUmUmCfUmUfAmUm |
| | | | | | | UmGmGmUpsmApsmA |
| 172 | 71 | Sense | ACCAAUAAGAAAA | 172 | 638 | mApsmCpsmCmAmAmUfAmA |
| | | | UGAUUUUU | | | fGfAfAmAmAmUmGmAmUm |
| | | | | | | UmUmUpsmU- |
| | | | | | | GalNAc4psGalNAc4psGalNAc4 |
| | 306 | Anti- | UAAAAUCAUUUUC | | 621 | vmApsfApsmAmAmAfUmCmA |
| | | Sense | UUAUUGGUAA | | | mUmUmUmUmCfUmUfAmUm |
| | | | | | | UmGmGmUpsmApsmA |
| 173 | 92 | Sense | UGGUAUCAAAACC | 173 | 595 | mUpsmGpsmGmUmAmUfCmA |
| | | | UCAUGUCU | | | fAfAfAmCmCmUmCmAmUm |
| | | | | | | GmUmCmU- |
| | | | | | | GalNAc4psGalNAc4psGalNAc4 |
| | 308 | Anti- | AGACAUGAGGUUU | | 639 | vmApsfGpsmAmCmAfUunGm |
| | | Sense | UGAUACCAGU | | | AmGmGmUmUmUfUmGfAmU |
| | | | | | | mAmCmCmApsmGpsmU |
| 174 | 92 | Sense | UGGUAUCAAAACC | 174 | 595 | mUpsmGpsmGmUmAmUfCmA |
| | | | UCAUGUCU | | | fAfAfAmCmCmUmCmAmUm |
| | | | | | | GmUmCmU- |
| | | | | | | GalNAc4psGalNAc4psGalNAc4 |
| | 308 | Anti- | AGACAUGAGGUUU | | 640 | vmApsfGpsmAmCmAfUmun34 |
| | | Sense | UGAUACCAGU | | | GmAmGmGmUmUmUfUmGfA |
| | | | | | | mUmAmCmCmApsmGpsmU |
| 175 | 92 | Sense | UGGUAUCAAAACC | 175 | 595 | mUpsmGpsmGmUmAmUfCmA |
| | | | UCAUGUCU | | | fAfAfAmCmCmUmCmAmUm |
| | | | | | | GmUmCmU- |
| | | | | | | GalNAc4psGalNAc4psGalNAc4 |
| | 308 | Anti- | AGACAUGAGGUUU | | 641 | vmApsfGpsmAmCmA3ohUmG |
| | | Sense | UGAUACCAGU | | | mAmGmGmUmUmUfUmGfAm |
| | | | | | | UmAmCmCmApsmGpsmU |
| 176 | 92 | Sense | UGGUAUCAAAACC | 176 | 595 | mUpsmGpsmGmUmAmUfCmA |
| | | | UCAUGUCU | | | fAfAfAmCmCmUmCmAmUm |
| | | | | | | GmUmCmU- |
| | | | | | | GalNAc4psGalNAc4psGalNAc4 |
| | 308 | Anti- | AGACAUGAGGUUU | | 642 | vmApsfGpsmAmCmAfU3ohGm |
| | | Sense | UGAUACCAGU | | | AmGmGmUmUmUfUmGfAmU |
| | | | | | | mAmCmCmApsmGpsmU |
| 177 | 92 | Sense | UGGUAUCAAAACC | 177 | 595 | mUpsmGpsmGmUmAmUfCmA |
| | | | UCAUGUCU | | | fAfAfAmCmCmUmCmAmUm |
| | | | | | | GmUmCmU- |
| | | | | | | GalNAc4psGalNAc4psGalNAc4 |
| | 308 | Anti- | AGACAUGAGGUUU | | 643 | vmApsfGpsmAmCmA3mUmG |
| | | Sense | UGAUACCAGU | | | mAmGmGmUmUmUfUmGfAm |
| | | | | | | UmAmCmCmApsmGpsmU |
| 178 | 92 | Sense | UGGUAUCAAAACC | 178 | 595 | mUpsmGpsmGmUmAmUfCmA |
| | | | UCAUGUCU | | | fAfAfAmCmCmUmCmAmUm |
| | | | | | | GmUmCmU- |
| | | | | | | GalNAc4psGalNAc4psGalNAc4 |
| | 308 | Anti- | AGACAUGAGGUUU | | 644 | vmApsfGpsmAmCmAfU3mGm |
| | | Sense | UGAUACCAGU | | | AmGmGmUmUmUfUmGfAmU |
| | | | | | | mAmCmCmApsmGpsmU |

TABLE 13

| SEQ ID | | |
|---|---|---|
| NO: | Description | Sequence |
| 261 | 17β-HSD | ATGAACATCATCCTAGAAATCCTTCTGCTTCTGATCACCATCAT |
| | type 13 | CTACTCCTACTTGGAGTCGTTGGTGAAGTTTTTCATTCCTCAGA |
| | coding | GGAGAAAATCTGTGGCTGGGGAGATTGTTCTCATTACTGGAGC |
| | sequence | TGGGCATGGAATAGGCAGGCAGACTACTTATGAATTTGCAAA |
| | (Genbank | ACGACAGAGCATATTGGTTCTGTGGGATATTAATAAGCGCGGT |
| | Accession | GTGGAGGAAACTGCAGCTGAGTGCCGAAAACTAGGCGTCACT |
| | No. NM | GCGCATGCGTATGTGGTAGACTGCAGCAACAGAGAAGAGATC |
| | 178135.5) | TATCGCTCTCTAAATCAGGTGAAGAAAGAAGTGGGTGATGTAA |
| | (nucleotides | CAATCGTGGTGAATAATGCTGGGACAGTATATCCAGCCGATCT |
| | 42 to 944) | TCTCAGCACCAAGGATGAAGAGATTACCAAGACATTTGAGGTC |
| | | AACATCCTAGGACATTTTTGGATCACAAAAGCACTTCTTCCAT |
| | | CGATGATGGAGAGAAATCATGGCCACATCGTCACAGTGGCTTC |
| | | AGTGTGCGGCCACGAAGGGATTCCTTACCTCATCCCATATTGT |
| | | TCCAGCAAATTTGCCGCTGTTGGCTTTCACAGAGGTCTGACAT |
| | | CAGAACTTCAGGCCTTGGGAAAAACTGGTATCAAAACCTCATG |
| | | TCTCTGCCCAGTTTTTGTGAATACTGGGTTCACCAAAAATCCA |
| | | AGCACAAGATTATGGCCTGTATTGGAGACAGATGAAGTCGTA |
| | | AGAAGTCTGATAGATGGAATACTTACCAATAAGAAAATGATTT |
| | | TTGTTCCATCGTATATCAATATCTTTCTGAGACTACAGAAGTTT |
| | | CTTCCTGAACGCGCCTCAGCGATTTTAAATCGTATGCAGAATA |
| | | TTCAATTTGAAGCAGTGGTTGGCCACAAAATCAAAATGAAATG |
| | | A |

### Exemplary Embodiments

[0803] Exemplary embodiments are provided below:

[0804] Embodiment 1. A short interfering nucleic acid (siNA) molecule comprising: (a) a sense strand comprising a first nucleotide sequence that is at least about 60%, 65%, 70%, 75%, 80%, 85%, 90%, 95%, or 100% identical to an RNA corresponding to a target gene, wherein the first nucleotide sequence: (i) is 15 to 30 nucleotides in length; and (ii) comprises 15 or more modified nucleotides independently selected from a 2′-O-methyl nucleotide and a 2′-fluoro nucleotide, wherein at least one modified nucleotide is a 2′-O-methyl nucleotide and the nucleotide at position 3, 5, 7, 8, 9, 10, 11, 12, 14, 17, and/or 19 from the 5′ end of the first nucleotide sequence is a 2′-fluoro nucleotide; and (b) an antisense strand comprising a second nucleotide sequence that is at least about 60%, 65%, 70%, 75%, 80%, 85%, 90%, 95%, or 100% complementary to the RNA corresponding to the target gene, wherein the second nucleotide sequence: (i) is 15 to 30 nucleotides in length; and (ii) comprises 15 or more modified nucleotides independently selected from a 2′-O-methyl nucleotide and a 2′-fluoro nucleotide, wherein at least one modified nucleotide is a 2′-O-methyl nucleotide and at least one modified nucleotide is a 2′-fluoro nucleotide.

[0805] Embodiment 2. In any preceding embodiment, the first nucleotide sequence may comprise a nucleotide sequence of any one of SEQ ID NOs: 1-100, 201-230, 262-287, 314, or 315.

[0806] Embodiment 3. In any preceding embodiment, the second nucleotide sequence may comprise a nucleotide sequence of any one of SEQ ID NOs: 101-200, or 231-260, 288-313.

[0807] Embodiment 4. In any preceding embodiment, the target gene may be hydroxysteroid 17-beta dehydrogenase 13 (HSD17B13). In any embodiment, the siNA may reduce or inhibit the production of a hydroxysteroid dehydrogenase. In any embodiment, the siNA molecule decreases expression or activity of HSD17B13.

[0808] Embodiment 5. In any preceding embodiment, the first nucleotide sequence comprises 16, 17, 18, 19, 20, 21, 22, 23, or more modified nucleotides independently selected from a 2′-O-methyl nucleotide and a 2′-fluoro nucleotide.

[0809] Embodiment 6. In any preceding embodiment, the 70%, 75%, 80%, 85%, 90%, 95% or 100% of the nucleotides in the first nucleotide sequence are modified nucleotides independently selected from a 2′-O-methyl nucleotide and a 2′-fluoro nucleotide.

[0810] Embodiment 7. In any preceding embodiment, at least 2, 3, 4, 5, or 6 modified nucleotides of the first nucleotide sequence are 2′-fluoro nucleotides.

[0811] Embodiment 8. In any preceding embodiment, no more than 10, 9, 8, 7, 6, 5, 4, 3, or 2 modified nucleotides of the first nucleotide sequence are 2′-fluoro nucleotides.

[0812] Embodiment 9. In any preceding embodiment, at least 10, 11, 12, 13, 14, 15, 16, 17, 18, 19, 20, 21, or 22 modified nucleotides of the first nucleotide sequence are 2′-O-methyl nucleotides.

[0813] Embodiment 10. In any preceding embodiment, no more than 25, 24, 23, 22, 21, 20, 19, 18, 17, 16, 15, 14, 13, 12, 11, 10, 9, 8, 7, 6, 5, 4, 3, or 2 modified nucleotides of the first nucleotide sequence are 2′-O-methyl nucleotides.

[0814] Embodiment 11. In any preceding embodiment, the second nucleotide sequence comprises 16, 17, 18, 19, 20, 21, 22, 23, or more modified nucleotides independently selected from a 2′-O-methyl nucleotide and a 2′-fluoro nucleotide.

[0815] Embodiment 12. In any preceding embodiment, 70%, 75%, 80%, 85%, 90%, 95% or 100% of the nucleotides in the second nucleotide sequence are modified nucleotides independently selected from a 2′-O-methyl nucleotide and a 2′-fluoro nucleotide.

[0816] Embodiment 13. In any preceding embodiment, at least 2, 3, 4, 5, or 6 modified nucleotides of the second nucleotide sequence are 2′-fluoro nucleotides.

[0817] Embodiment 14. In any preceding embodiment, less than or equal to 10, 9, 8, 7, 6, 5, 4, 3, or 2 modified nucleotides of the second nucleotide sequence are 2′-fluoro nucleotides.

[0818] Embodiment 15. In any preceding embodiment, at least 10, 11, 12, 13, 14, 15, 16, 17, 18, 19, 20, 21, or 22 modified nucleotides of the second nucleotide sequence are 2′-O-methyl nucleotides.

[0819] Embodiment 16. In any preceding embodiment, less than or equal to 25, 24, 23, 22, 21, 20, 19, 18, 17, 16, 15, 14, 13, 12, 11, 10, 9, 8, 7, 6, 5, 4, 3, or 2 modified nucleotides of the second nucleotide sequence are 2′-O-methyl nucleotides.

[0820] Embodiment 17. In any preceding embodiment, at least 1, 2, 3, 4, 5, 6, or 7 nucleotides at position 3, 5, 7, 8, 9, 10, 11, 12, and/or 17 from the 5′ end of the first nucleotide sequence is a 2′-fluoro nucleotide.

[0821] Embodiment 18. In any preceding embodiment, at least 1, 2, 3, 4, 5, 6, 7, 8, or 9 nucleotides at position 2, 5, 6, 8, 10, 14, 16, 17, and/or 18 from the 5′ end of the second nucleotide sequence is a 2′-fluoro nucleotide.

[0822] Embodiment 19. In any preceding embodiment, the nucleotides in the second nucleotide sequence are arranged in an alternating 1:3 modification pattern, and wherein 1 nucleotide is a 2′-fluoro nucleotide and 3 nucleotides are 2′-O-methyl nucleotides. In any embodiment, the alternating 1:3 modification pattern occurs 2-5 times. In any embodiment, at least two of the alternating 1:3 modification pattern occur consecutively. In any embodiment, at least two of the alternating 1:3 modification pattern occurs nonconsecutively. In any embodiment, at least 1, 2, 3, 4, or 5 alternating 1:3 modification pattern begins at nucleotide position 2, 6, 10, 14, and/or 18 from the 5′ end of the antisense strand.

[0823] Embodiment 20. In any preceding embodiment, the nucleotides in the second nucleotide sequence are arranged in an alternating 1:2 modification pattern. In any embodiment, 1 nucleotide is a 2′-fluoro nucleotide and 2 nucleotides are 2′-O-methyl nucleotides. In any embodiment, the alternating 1:2 modification pattern occurs 2-5 times. In any embodiment, at least two of the alternating 1:2 modification pattern occurs consecutively. In any embodiment, at least two of the alternating 1:2 modification pattern occurs nonconsecutively. In any embodiment, at least 1, 2, 3, 4, or 5 alternating 1:2 modification pattern begins at nucleotide position 2, 5, 8, 14, and/or 17 from the 5′ end of the antisense strand.

[0824] Embodiment 21. A short interfering nucleic acid (siNA) molecule represented by Formula (VIII):

5′-Aₙ¹Bₙ²Aₙ³Bₙ⁴Aₙ⁵Bₙ⁶Aₙ⁷Bₙ⁸Aₙ⁹-3′
3′-C_{q}¹A_{q}²B_{q}³A_{q}⁴B_{q}⁵A_{q}⁶B_{q}⁷A_{q}⁸B_{q}⁹A_{q}¹⁰B_{q}¹¹A_{q}¹²-5′

[0825] wherein: the top strand is a sense strand comprising a first nucleotide sequence that is at least about 60%, 65%, 70%, 75%, 80%, 85%, 90%, 95%, or 100% identical to an RNA corresponding to a target gene, wherein the first nucleotide sequence comprises 15 to 30 nucleotides; the bottom strand is an antisense strand comprising a second nucleotide sequence that is at least about 60%, 65%, 70%, 75%, 80%, 85%, 90%, 95%, or 100% complementary to the RNA corresponding to the target gene, wherein the second nucleotide sequence comprises 15 to 30 nucleotides; each A is independently a 2′-O-methyl nucleotide or a nucleotide comprising a 5′-stabilized end cap or a phosphorylation blocker; B is a 2′-fluoro nucleotide; C represents overhanging nucleotides and is a 2′-O-methyl nucleotide, deoxy nucleotide, or uracil; n¹=1-6 nucleotides in length; each n², n⁶, n⁸, q³, q⁵, q⁷, q⁹, q¹¹, and q¹² is independently 0-1 nucleotides in length; each n³ and n⁴ is independently 1-3 nucleotides in length; n⁵ is 1-10 nucleotides in length; n⁷ is 0-4 nucleotides in length; each n⁹, q¹, and q² is independently 0-2 nucleotides in length; q⁴ is 0-3 nucleotides in length; q⁶ is 0-5 nucleotides in length; q⁸ is 2-7 nucleotides in length; and q¹⁰ is 2-11 nucleotides in length.

[0826] Embodiment 22. In embodiment 21, the first nucleotide sequence may comprise a nucleotide sequence of any one of SEQ ID NOs: 1-100, 201-230, 262-287, 314, or 315.

[0827] Embodiment 23. In embodiment 21 or 22, the second nucleotide sequence may comprise a nucleotide sequence of any one of SEQ ID NOs: 101-200, or 231-260, 288-313.

[0828] Embodiment 24. In any one of embodiments 21-23, the siNA may reduce or inhibit the production of a hydroxysteroid dehydrogenase.

[0829] Embodiment 25. In any one of embodiments 21-24, the siNA may be represented by Formula (IX):

5′-A₂₋₆B₁A₁₋₃B₂₋₃A₂₋₁₀B₀₋₁A₀₋₄B₀₋₁A₀₋₂-3′
3′-C₂A₀₋₂B₀₋₁A₀₋₃B₀₋₁A₀₋₅B₀₋₁A₂₋₇B₁A₂₋₁₁B₁A₁-5′

[0830] wherein: the top strand is a sense strand comprising a first nucleotide sequence that is at least about 60%, 65%, 70%, 75%, 80%, 85%, 90%, 95%, or 100% identical to an RNA corresponding to a target gene, wherein the first nucleotide sequence comprises 15 to 30 nucleotides; the bottom strand is an antisense strand comprising a second nucleotide sequence that is at least about 60%, 65%, 70%, 75%, 80%, 85%, 90%, 95%, or 100% complementary to the RNA corresponding to the target gene, wherein the second nucleotide sequence comprises 15 to 30 nucleotides; each A is independently a 2′-O-methyl nucleotide or a nucleotide comprising a 5′-stabilized end cap or a phosphorylation blocker; B is a 2′-fluoro nucleotide; C represents overhanging nucleotides and is a 2′-O methyl nucleotide, deoxy nucleotide, or uracil.

[0831] Embodiment 26. In any one of embodiments 21-25, the (a) a sense strand comprising a first nucleotide sequence consisting of 17 to 23 nucleotides, wherein 2′-fluoro nucleotides are at positions 3, 7-9, 12, and 17 from the 5′ end of the first nucleotide sequence, and wherein 2′-O methyl nucleotides are at positions 1, 2, 4-6, 10, 11, and 13-16 from the 5′ end of the first nucleotide sequence; and (b) an antisense strand comprising a second nucleotide sequence consisting of 17 to 23 nucleotides. In some embodiments, 2′-fluoro nucleotides are at positions 2 and 14 from the 5′ end of the second nucleotide sequence, and wherein 2′-O methyl nucleotides are at positions 1, 3-13, and 15-17 from the 5′ end of the second nucleotide sequence. In some embodiments, the nucleotides in the second nucleotide sequence are arranged in an alternating 1:3 modification pattern, and wherein 1 nucleotide is a 2′-fluoro nucleotide and 3 nucleotides are 2′-O methyl nucleotides. In some embodiments, the nucleotides in the second nucleotide sequence are arranged in an alternating 1:2 modification pattern, and wherein 1 nucleotide is a 2′-fluoro nucleotide and 2 nucleotides are 2′-O methyl nucleotides. In any embodiment, the first nucleotide sequence consists of 19 nucleotides. In any embodiment, 2′-O methyl nucleotides are at positions 18 and 19 from the 5′ end of the first nucleotide sequence. In any embodiment, the second nucleotide sequence consists of 21 nucleotides. In any embodiment, 2′-O methyl nucleotides are at positions 18-21 or 19-21 from the 5′ end of the second nucleotide sequence.

[0832] Embodiment 27. In any one of embodiments 21-25, the (a) a sense strand comprising a first nucleotide sequence consisting of 17 to 23 nucleotides, wherein 2′-fluoro nucleotides are at positions 3, 7, 8, and 17 from the 5′ end of the first nucleotide sequence, and wherein 2′-O methyl nucleotides are at positions 1, 2, 4-6, and 9-16 from the 5′ end of the first nucleotide sequence; and (b) an antisense strand comprising a second nucleotide sequence consisting of 17 to 23 nucleotides. In some embodiments, 2′-fluoro nucleotides are at positions 2 and 14 from the 5′ end of the second nucleotide sequence, and wherein 2′-O methyl nucleotides are at positions 1, 3-13, and 15-17 from the 5′ end of the second nucleotide sequence. In some embodiments, the nucleotides in the second nucleotide sequence are arranged in an alternating 1:3 modification pattern, and wherein 1 nucleotide is a 2′-fluoro nucleotide and 3 nucleotides are 2′-O methyl nucleotides. In some embodiments, the nucleotides in the second nucleotide sequence are arranged in an alternating 1:2 modification pattern, and wherein 1 nucleotide is a 2′-fluoro nucleotide and 2 nucleotides are 2′-O methyl nucleotides. In any embodiment, the first nucleotide sequence consists of 19 nucleotides. In any embodiment, 2′-O methyl nucleotides are at positions 18 and 19 from the 5′ end of the first nucleotide sequence. In any embodiment, the second nucleotide sequence consists of 21 nucleotides. In any embodiment, 2′-O methyl nucleotides are at positions 18-21 or 19-21 from the 5′ end of the second nucleotide sequence.

[0833] Embodiment 28. In any one of embodiments 21-25, the (a) a sense strand comprising a first nucleotide sequence consisting of 17 to 23 nucleotides, wherein 2′-fluoro nucleotides are at positions 3, 7-9, and 17 from the 5′ end of the first nucleotide sequence, and wherein 2′-O methyl nucleotides are at positions 1, 2, 4-6, and 10-16 from the 5′ end of the first nucleotide sequence; and (b) an antisense strand comprising a second nucleotide sequence consisting of 17 to 23 nucleotides. In some embodiments, 2′-fluoro nucleotides are at positions 2, 6, 10, and 14 from the 5′ end of the second nucleotide sequence, and wherein 2′-O methyl nucleotides are at positions 1, 3-5, 7-9, 11-13, and 15-17 from the 5′ end of the second nucleotide sequence. In some embodiments, the nucleotides in the second nucleotide sequence are arranged in an alternating 1:3 modification pattern, and wherein 1 nucleotide is a 2′-fluoro nucleotide and 3 nucleotides are 2′-O methyl nucleotides. In some embodiments, the nucleotides in the second nucleotide sequence are arranged in an alternating 1:2 modification pattern, and wherein 1 nucleotide is a 2′-fluoro nucleotide and 2 nucleotides are 2′-O methyl nucleotides. In any embodiment, the first nucleotide sequence consists of 19 nucleotides. In any embodiment, 2′-O methyl nucleotides are at positions 18 and 19 from the 5′ end of the first nucleotide sequence. In any embodiment, the second nucleotide sequence consists of 21 nucleotides. In any embodiment, 2′-O methyl nucleotides are at positions 19-21 from the 5′ end of the second nucleotide sequence.

[0834] Embodiment 29. In any one of embodiments 21-25, the (a) a sense strand comprising a first nucleotide sequence consisting of 17 to 23 nucleotides, wherein 2′-fluoro nucleotides are at positions 5 and 7-9 from the 5′ end of the first nucleotide sequence, and wherein 2′-O methyl nucleotides are at positions 1-4, 6, and 10-17 from the 5′ end of the first nucleotide sequence; and (b) an antisense strand comprising a second nucleotide sequence consisting of 17 to 23 nucleotides. In some embodiments, 2′-fluoro nucleotides are at positions 2, 6, 10, and 14 from the 5′ end of the second nucleotide sequence, and wherein 2′-O methyl nucleotides are at positions 1, 3-5, 7-9, 11-13 and 15-17 from the 5′ end of the second nucleotide sequence. In some embodiments, the nucleotides in the second nucleotide sequence are arranged in an alternating 1:3 modification pattern, and wherein 1 nucleotide is a 2′-fluoro nucleotide and 3 nucleotides are 2′-O methyl nucleotides. In some embodiments, the nucleotides in the second nucleotide sequence are arranged in an alternating 1:2 modification pattern, and wherein 1 nucleotide is a 2′-fluoro nucleotide and 2 nucleotides are 2′-O methyl nucleotides. In any embodiment, the first nucleotide sequence consists of 19 nucleotides. In any embodiment, 2′-O methyl nucleotides are at positions 18 and 19 from the 5′ end of the first nucleotide sequence. In any embodiment, the second nucleotide sequence consists of 21 nucleotides. In any embodiment, 2′-fluoro nucleotide is at position 18 from the 5′ end of the second nucleotide sequence. In any embodiment, 2′-O methyl nucleotides are at positions 19-21 from the 5′ end of the second nucleotide sequence.

[0835] Embodiment 30. In any one of embodiments 21-25, the (a) a sense strand comprising a first nucleotide sequence consisting of 17 to 23 nucleotides, wherein 2′-fluoro nucleotides are at positions 5 and 7-9 from the 5′ end of the first nucleotide sequence, and wherein 2′-O methyl nucleotides are at positions 1-4, 6, and 10-17 from the 5′ end of the first nucleotide sequence; and (b) an antisense strand comprising a second nucleotide sequence consisting of 17 to 23 nucleotides. In some embodiments, 2′-fluoro nucleotides are at positions 2, 5, 8, 14, and 17 from the 5′ end of the first nucleotide sequence, and wherein 2′-O methyl nucleotides are at positions 1, 3, 4, 6, 7, 9-13, 15, and 16 from the 5′ end of the first nucleotide sequence. In some embodiments, the nucleotides in the second nucleotide sequence are arranged in an alternating 1:3 modification pattern, and wherein 1 nucleotide is a 2′-fluoro nucleotide and 3 nucleotides are 2′-O methyl nucleotides. In some embodiments, the nucleotides in the second nucleotide sequence are arranged in an alternating 1:2 modification pattern, and wherein 1 nucleotide is a 2′-fluoro nucleotide and 2 nucleotides are 2′-O methyl nucleotides. In any embodiment, the first nucleotide sequence consists of 19 nucleotides. In any embodiment, 2′-O methyl nucleotides are at positions 18 and 19 from the 5′ end of the first nucleotide sequence. In any embodiment, the second nucleotide sequence consists of 21 nucleotides. In any embodiment, 2′-O methyl nucleotides are at positions 18-21 or 19-21 from the 5′ end of the second nucleotide sequence.

[0836] Embodiment 31. In any one of embodiments 21-25, the (a) a sense strand comprising a first nucleotide sequence consisting of 17 to 23 nucleotides, wherein 2′-fluoro nucleotides are at positions 5 and 7-9 from the 5′ end of the first nucleotide sequence, and wherein 2′-O methyl nucleotides are at positions 1-4, 6, and 10-17 from the 5′ end of the first nucleotide sequence; and (b) an antisense strand comprising a second nucleotide sequence consisting of 17 to 23 nucleotides. In some embodiments, 2′-fluoro nucleotides are at positions 2, 6, 14, and 16 from the 5′ end of the second nucleotide sequence, and wherein 2′-O methyl nucleotides are at positions 1, 3-5, 7-13, 15, and 17 from the 5′ end the second nucleotide sequence. In some embodiments, the nucleotides in the second nucleotide sequence are arranged in an alternating 1:3 modification pattern, and wherein 1 nucleotide is a 2′-fluoro nucleotide and 3 nucleotides are 2′-O methyl nucleotides. In some embodiments, the nucleotides in the second nucleotide sequence are arranged in an alternating 1:2 modification pattern, and wherein 1 nucleotide is a 2′-fluoro nucleotide and 2 nucleotides are 2′-O methyl nucleotides. In any embodiment, first nucleotide sequence consists of 19 nucleotides. In any embodiment, 2′-O methyl nucleotides are at positions 18 and 19 from the 5′ end of the first nucleotide sequence. In any embodiment, the second nucleotide sequence consists of 21 nucleotides. In any embodiment, 2′-O methyl nucleotides are at positions 18-21 or 19-21 from the 5′ end of the second nucleotide sequence.

[0837] Embodiment 32. In any one of embodiments 21-25, the (a) a sense strand comprising a first nucleotide sequence consisting of 17 to 23 nucleotides, wherein 2′-fluoro nucleotides are at positions 5, 9-11, and 14 from the 5′ end of the first nucleotide sequence, and wherein 2′-O-methyl nucleotides are at positions 1-4, 6-8, 12, 13, and 15-17 from the 5′ end of the first nucleotide sequence; and (b) an antisense strand comprising a second nucleotide sequence consisting of 17 to 23 nucleotides. In some embodiments, 2′-fluoro nucleotides are at positions 2 and 14 from the 5′ end of the second nucleotide sequence, and wherein 2′-O methyl nucleotides are at positions 1, 3-13, and 15-17 from the 5′ end the second nucleotide sequence. In some embodiments, the nucleotides in the second nucleotide sequence are arranged in an alternating 1:3 modification pattern, and wherein 1 nucleotide is a 2′-fluoro nucleotide and 3 nucleotides are 2′-O methyl nucleotides. In some embodiments, the nucleotides in the second nucleotide sequence are arranged in an alternating 1:2 modification pattern, and wherein 1 nucleotide is a 2′-fluoro nucleotide and 2 nucleotides are 2′-O methyl nucleotides. In any embodiment, the first nucleotide sequence consists of 21 nucleotides. In any embodiment, 2′-O methyl nucleotides are at positions 18, 20, and 21 from the 5′ end of the first nucleotide sequence. In any embodiment, 2′-fluoro nucleotide is at position 19 from the 5′ end of the first nucleotide sequence. In any embodiment, the second nucleotide sequence consists of 23 nucleotides. In any embodiment, 2′-O methyl nucleotides are at positions 18-23 from the 5′ end of the second nucleotide sequence.

[0838] Embodiment 33. In any one of embodiments 21-25, the (a) a sense strand comprising a first nucleotide sequence consisting of 17 to 23 nucleotides, wherein 2′-fluoro nucleotides are at positions 7 and 9-11 from the 5′ end of the first nucleotide sequence, and wherein 2′-O methyl nucleotides are at positions 1-6, 8, and 12-17 from the 5′ end of the first nucleotide sequence; and (b) an antisense strand comprising a second nucleotide sequence consisting of 17 to 23 nucleotides. In some embodiments, 2′-fluoro nucleotides are at positions 2, 6, 14, and 16 from the 5′ end of the second nucleotide sequence, and wherein 2′-O methyl nucleotides are at positions 1, 3-5, 7-13, 15, and 17 from the 5′ end the second nucleotide sequence. In some embodiments, the nucleotides in the second nucleotide sequence are arranged in an alternating 1:3 modification pattern, and wherein 1 nucleotide is a 2′-fluoro nucleotide and 3 nucleotides are 2′-O methyl nucleotides. In some embodiments, the nucleotides in the second nucleotide sequence are arranged in an alternating 1:2 modification pattern, and wherein 1 nucleotide is a 2′-fluoro nucleotide and 2 nucleotides are 2′-O methyl nucleotides. In any embodiment, the first nucleotide sequence consists of 21 nucleotides. In any embodiment, 2′-O methyl nucleotides are at positions 18-21 from the 5′ end of the first nucleotide sequence. In any embodiment, the second nucleotide sequence consists of 23 nucleotides. In any embodiment, 2′-O methyl nucleotides are at positions 18-21 from the 5′ end of the second nucleotide sequence.

[0839] Embodiment 34. In any proceeding embodiment, the sense strand may further comprises TT sequence adjacent to the first nucleotide sequence.

[0840] Embodiment 35. In any proceeding embodiment, the antisense strand may further comprises TT sequence adjacent to the first nucleotide sequence.

[0841] Embodiment 36. In any proceeding embodiment, the sense strand may further comprises at least 1, 2, 3, 4, 5, 6, 7, 8, 9, 10, 11, 12, 13, 14, 15 or more phosphorothioate internucleoside linkages.

[0842] Embodiment 37. In any proceeding embodiment, the antisense strand may further comprises at least 1, 2, 3, 4, 5, 6, 7, 8, 9, 10, 11, 12, 13, 14, 15 or more phosphorothioate internucleoside linkages.

[0843] Embodiment 38. In any proceeding embodiment, the first nucleotide sequence further comprises 1 or more phosphorothioate internucleoside linkages.

[0844] Embodiment 39. In any proceeding embodiment, the second nucleotide sequence further comprises 1 or more phosphorothioate internucleoside linkages.

[0845] Embodiment 40. In any proceeding embodiment, at least one phosphorothioate internucleoside linkage is between the nucleotides at positions 1 and 2 from the 5′ end of the first nucleotide sequence.

[0846] Embodiment 41. In any proceeding embodiment, at least one phosphorothioate internucleoside linkage is between the nucleotides at positions 2 and 3 from the 5′ end of the first nucleotide sequence.

[0847] Embodiment 42. In any proceeding embodiment, at least one phosphorothioate internucleoside linkage is between the nucleotides at positions 1 and 2 from the 5′ end of the second nucleotide sequence.

[0848] Embodiment 43. In any proceeding embodiment, at least one phosphorothioate internucleoside linkage is between the nucleotides at positions 2 and 3 from the 5′ end of the second nucleotide sequence.

[0849] Embodiment 44. In any proceeding embodiment, the first nucleotide sequence may further comprises 1 or more mesyl phosphoroamidate internucleoside linkages, the second nucleotide sequence further comprises 1 or more mesyl phosphoroamidate internucleoside linkages, or a combination thereof. In any embodiment, the sense strand comprises at least 1, 2, 3, 4, 5, 6, 7, 8, 9, 10, 11, 12, 13, 14, 15 or more mesyl phosphoroamidate internucleoside linkages. In any embodiment, the antisense strand further comprises at least 1, 2, 3, 4, 5, 6, 7, 8, 9, 10, 11, 12, 13, 14, 15 or more mesyl phosphoroamidate internucleoside linkages.

[0850] Embodiment 45. In embodiment 44, at least one mesyl phosphoroamidate internucleoside linkage is between the nucleotides at positions 1 and 2 from the 5′ end of the first nucleotide sequence and/or second nucleotide sequence.

[0851] Embodiment 46. In embodiment 44 or 45, at least one mesyl phosphoroamidate internucleoside linkage is between the nucleotides at positions 2 and 3 from the 5′ end of the first nucleotide sequence and/or second nucleotide sequence.

[0852] Embodiment 47. In any one of embodiments 44-46, at least one mesyl phosphoroamidate internucleoside linkage is between the nucleotides at positions 1 and 2 from the 3′ end of the first nucleotide sequence and/or second nucleotide sequence.

[0853] Embodiment 48. In any one of embodiments 44-47, at least one mesyl phosphoroamidate internucleoside linkage is between the nucleotides at positions 2 and 3 from the 3′ end of the first nucleotide sequence and/or second nucleotide sequence.

[0854] Embodiment 49. In any proceeding embodiment, the first nucleotide from the 5′ end of the first nucleotide sequence comprises a 5′ stabilizing end cap.

[0855] Embodiment 50. In any proceeding embodiment, the first nucleotide from the 5′ end of the second nucleotide sequence comprises a 5′ stabilizing end cap.

[0856] Embodiment 51. In embodiment 49 or 50, the 5′-stabilized end cap may be Formula (I′):

[chemical structure]

wherein: R¹ is a nucleobase, aryl, heteroaryl, or H, R²⁶ is

[chemical structure]

—CH═CD-Z, —CD═CH—Z, —CD═CD-Z, —(CR²¹R²²)ₙ—Z, or —(C₂-C₆ alkenylene)-Z and R²⁰ is hydrogen; or R² and R²⁰ together form a 3- to 7-membered carbocyclic ring substituted with —(CR²¹R²²)ₙ—Z or —(C₂-C₆ alkenylene)-Z; n is 1, 2, 3, or 4; Z is —ONR²³R²⁴, —OP(O)OH(CH₂)ₘCO₂R²³, —OP(S)OH(CH₂)ₘCO₂R²³, —P(O)(OH)₂, —P(O)(OH)(OCH₃), —P(O)(OH)(OCD₃), —SO₂ (CH₂)ₘP(O)(OH)₂, —SO₂NR²³R²⁵, —NR²³R²⁴, R²¹ and R²² are independently hydrogen or C₁-C₆ alkyl; R²¹ and R²² together form an oxo group; R²³ is hydrogen or C₁-C₆ alkyl; R²⁴ is-SO₂R²⁵ or —C(O)R²⁵; or R²³ and R²⁴ together with the nitrogen to which they are attached form a substituted or unsubstituted heterocyclic ring; R²⁵ is C₁-C₆ alkyl; R¹⁰⁰ is —OCH₃, —OCD₃, or —F; and m is 1, 2, 3, or 4. In some embodiments, the 5′-stabilized end cap may be selected from the group consisting of Formula (1) to Formula (15), Formula (9X) to Formula (12X), and Formula (9Y) to Formula (12Y):

[chemical structure]

[chemical structure]

[chemical structure]

[chemical structure]

wherein R¹ is a nucleobase, aryl, heteroaryl, or H. In some embodiments, The 5′-stabilized end cap may be selected from the group consisting of Formulas (1A)-(15A), Formulas (9B)-(12B), Formulas (9AX)-(12AX), Formulas (9AY)-(12AY), Formulas (9BX)-(12BX), and Formulas (9BY)-(12BY):

[chemical structure]

[chemical structure]

[chemical structure]

[chemical structure]

[chemical structure]

[chemical structure]

[chemical structure]

In some embodiments, The 5′-stabilized end cap may be selected from the group consisting of Formula (21) to Formula (35):

[chemical structure]

[chemical structure]

[chemical structure]

wherein R¹ is a nucleobase, aryl, heteroaryl, or H. In some embodiments, The 5′-stabilized end cap may be selected from the group consisting of Formulas (21A)-(35A), Formulas (29B)-(32B), Formulas (29AX)-(32AX), Formulas (29AY)-(32AY), Formulas (29BX)-(32BX), and Formulas (29BY)-(32BY):

[chemical structure]

[chemical structure]

[chemical structure]

[chemical structure]

[chemical structure]

[chemical structure]

[chemical structure]

wherein R¹ is a nucleobase, aryl, heteroaryl, or H.

[0857] Embodiment 52. In any one of embodiments 49-51, the 5′-stabilized end cap may comprise a 5′ vinyl phosphonate or deuterated 5′ vinyl phosphonate.

[0858] Embodiment 53. In embodiments 49 or 50, the 5′-stabilized end cap may be Formula (IA) or (IIB):

[chemical structure]

wherein R¹ is a nucleobase, aryl, heteroaryl, or H.

[0859] Embodiment 54. In embodiments 49 or 50, the 5′-stabilized end cap may be Formula (IIIA) or (IIIB):

[chemical structure]

[0860] wherein R¹ is a nucleobase, aryl, heteroaryl, or H; and R¹⁵ is H or CH₃.

[0861] Embodiment 55. In embodiment 49 or 50, the 5′-stabilized end cap may be

[chemical structure]

[0862] Embodiment 56. In any one of embodiments 49-55, the 5′ end of the antisense strand via one or more linkers independently selected from a phosphodiester linker, phosphorothioate linker, or phosphorodithioate linker.

[0863] Embodiment 57. In any one of embodiments 49-56, the 5′ end of the sense strand via one or more linkers independently selected from a phosphodiester linker, phosphorothioate linker, or phosphorodithioate linker.

[0864] Embodiment 58. In any proceeding embodiment, the first nucleotide from the 5′ end of the first nucleotide sequence comprises a phosphorylation blocker.

[0865] Embodiment 59. In any proceeding embodiment, the first nucleotide from the 5′ end of the second nucleotide sequence comprises a phosphorylation blocker.

[0866] Embodiment 60. In embodiment 58 or 59, the phosphorylation blocker may be a phosphorylation blocker of Formula (IV):

[chemical structure]

wherein R¹ is a nucleobase, R⁴ is —O—R³⁰ or —NR³¹R³², R³⁰ is C₁-C₈ substituted or unsubstituted alkyl; and R³¹ and R³² together with the nitrogen to which they are attached form a substituted or unsubstituted heterocyclic ring.

[0867] Embodiment 61. In any proceeding embodiment, the siNA molecule may include at least one modified nucleotide of Formula (IV):

[chemical structure]

[0868] Embodiment 62. In any proceeding embodiment, the phosphorylation blocker is attached to the 5′ end of the sense strand.

[0869] Embodiment 63. In any proceeding embodiment, the phosphorylation blocker is attached to the 3′ end of the sense strand.

[0870] Embodiment 64. In any proceeding embodiment, the phosphorylation blocker is attached to the 5′ end of the antisense strand.

[0871] Embodiment 65. In any proceeding embodiment, the phosphorylation blocker is attached to the 3′ end of the antisense strand.

[0872] Embodiment 66. In any proceeding embodiment, the phosphorylation blocker is attached to the 5′ end of the sense strand via one or more linkers independently selected from a phosphodiester linker, phosphorothioate linker, and phosphorodithioate linker.

[0873] Embodiment 67. In any proceeding embodiment, the phosphorylation blocker is attached to the 3′ end of the sense strand via one or more linkers independently selected from a phosphodiester linker, phosphorothioate linker, and phosphorodithioate linker.

[0874] Embodiment 68. In any proceeding embodiment, the phosphorylation blocker is attached to the 5′ end of the antisense strand via one or more linkers independently selected from a phosphodiester linker, phosphorothioate linker, and phosphorodithioate linker.

[0875] Embodiment 69. In any proceeding embodiment, the phosphorylation blocker is attached to the 3′ end of the antisense strand via one or more linkers independently selected from a phosphodiester linker, phosphorothioate linker, and phosphorodithioate linker.

[0876] Embodiment 70. In any proceeding embodiment, the siNA molecule further comprises a galactosamine.

[0877] Embodiment 71. In embodiment 70, the galactosamine is N-acetylgalactosamine (GalNAc) of Formula (VII):

[chemical structure]

[0878] wherein each n is independently 1 or 2.

[0879] Embodiment 72. In embodiment 70, the galactosamine is N-acetylgalactosamine (GalNAc) of Formula (VI):

[chemical structure]

[0880] wherein m is 1, 2, 3, 4, or 5; each n is independently 1 or 2; p is 0 or 1; each R is independently H; each Y is independently selected from —O—P(═O)(SH)—, —O—P(═O)(O)—, —O—P(═O)(OH)—, and —O—P(S)S—; Z is H or a second protecting group; either L is a linker or L and Y in combination are a linker; and A is H, OH, a third protecting group, an activated group, or an oligonucleotide. In some embodiments, A is an oligonucleotide. In some embodiments, A is 1-2 oligonucleotides. In some embodiments, the oligonucleotide is dTdT.

[0881] Embodiment 73. In any one of embodiments 70-72, the galactosamine may be attached to the 3′ end of the sense strand.

[0882] Embodiment 74. In any one of embodiments 70-73, the galactosamine may be attached to the 5′ end of the sense strand.

[0883] Embodiment 75. In any one of embodiments 70-74, the galactosamine may be attached to the 3′ end of the antisense strand.

[0884] Embodiment 76. In any one of embodiments 70-75, the galactosamine may be attached to the 5′ end of the antisense strand.

[0885] Embodiment 77. In any one of embodiments 70-76, the galactosamine may be attached to the 3′ end of the sense strand via one or more linkers independently selected from a phosphodiester linker, phosphorothioate linker, or phosphorodithioate linker.

[0886] Embodiment 78. In any one of embodiments 70-77, the galactosamine may be attached to the 5′ end of the sense strand via one or more linkers independently selected from a phosphodiester linker, phosphorothioate linker, or phosphorodithioate linker.

[0887] Embodiment 80. In any one of embodiments 70-78, the galactosamine may be attached to the 3′ end of the antisense strand via one or more linkers independently selected from a phosphodiester linker, phosphorothioate linker, or phosphorodithioate linker.

[0888] Embodiment 81. In any one of embodiments 70-79, the galactosamine may be attached to the 5′ end of the antisense strand via one or more linkers independently selected from a phosphodiester linker, phosphorothioate linker, or phosphorodithioate linker.

[0889] Embodiment 82. In any proceeding embodiment, the antisense strand, sense strand, first nucleotide sequence, and/or second nucleotide sequence comprises at least one thermally destabilizing nucleotide selected from:

[chemical structure]

or a combination thereof.

[0890] Embodiment 83. In any proceeding embodiment, at least one 2′-fluoro nucleotide or 2′-O-methyl nucleotide is a 2′-fluoro or 2-O-methyl nucleotide mimic of Formula (V):

[chemical structure]

wherein R¹ is independently a nucleobase, aryl, heteroaryl, or H; Q¹ and Q² are independently S or Ol R⁵ is independently —OCD₃, —F, or —OCH₃; and R⁶ and R⁷ are independently H, D, or CD₃.

[0891] Embodiment 84. In embodiment 83, the 2′-fluoro or 2′-O-methyl nucleotide mimic may be a nucleotide mimic of Formula (16)-Formula (20):

[chemical structure]

[0892] wherein R¹ is a nucleobase and R² is independently F or —OCH₃.

[0893] Embodiment 85. In any proceeding embodiment, at least one 2′-fluoro nucleotide may be a 2′-fluoro nucleotide mimic.

[0894] Embodiment 86. In embodiment 85, at least 1, 2, 3, 4, 5, or more 2′-fluoro nucleotides on the antisense strand or the second nucleotide sequence is a 2′-fluoro nucleotide mimic.

[0895] Embodiment 87. In embodiment 85 or 86, the nucleotide at position 2, 5, 6, 8, 10, 14, 16, and/or 17 from the 5′ end of the antisense strand or the second nucleotide sequence is a 2′-fluoro nucleotide mimic.

[0896] Embodiment 88. In any one of embodiments 85-87, at least 1, 2, 3, 4, 5, or more 2′-fluoro nucleotides on the sense strand or the first nucleotide sequence is a 2′-fluoro nucleotide mimic.

[0897] Embodiment 89. In any one of embodiments 85-88, the nucleotide at position 3, 5, 7, 8, 9, 10, 11, 12, 14, and/or 17 from the 5′ end of the sense strand or the first nucleotide sequence is a 2′-fluoro nucleotide mimic.

[0898] Embodiment 90. In any one of embodiments 85-89, at least 1, 2, 3, 4, 5, 6, or more 2′-fluoro nucleotide mimics is a f4P nucleotide

[chemical structure]

[0899] Embodiment 91. In any one of embodiments 85-90, less than or equal to 10, 9, 8, 7, 6, 5, 4, 3, or 2 2′-fluoro nucleotide mimics is a f4P nucleotide

[chemical structure]

[0900] Embodiment 92. In any one of embodiments 85-91, 1, 2, 3, 4, 5, 6, or more 2′-fluoro nucleotide mimics is a f2P nucleotide

[chemical structure]

[0901] Embodiment 93. In any one of embodiments 85-92, less than or equal to 10, 9, 8, 7, 6, 5, 4, 3, or 2 2′-fluoro nucleotide mimics is a f2P nucleotide

[chemical structure]

[0902] Embodiment 94. In any one of embodiments 85-93, 1, 2, 3, 4, 5, 6, or more 2′-fluoro nucleotide mimics is a fX nucleotide

[chemical structure]

[0903] Embodiment 95. In any one of embodiments 85-94, less than or equal to 10, 9, 8, 7, 6, 5, 4, 3, or 2 2′-fluoro nucleotide mimics is a fX nucleotide

[chemical structure]

[0904] Embodiment 96. In any proceeding embodiment, the first nucleotide from the 5′ end of the antisense strand or second nucleotide sequence is a d2vd3 nucleotide

[chemical structure]

[0905] Embodiment 97. In any proceeding embodiment, the first nucleotide from the 3′ end of the antisense strand or second nucleotide sequence is a d2vd3 nucleotide

[chemical structure]

[0906] Embodiment 98. In any proceeding embodiment, at least one end of the siNA is a blunt end.

[0907] Embodiment 99. In any proceeding embodiment, at least one end of the siNA comprises an overhang, wherein the overhang comprises at least one nucleotide.

[0908] Embodiment 100. In any proceeding embodiment, both ends of the siNA comprise an overhang, wherein the overhang comprises at least one nucleotide.

[0909] Embodiment 101. In any proceeding embodiment, the target gene is a hydroxysteroid 17-beta dehydrogenase 13 (HSD17B13).

[0910] Embodiment 102. In any proceeding embodiment, the first nucleotide sequence comprises a nucleotide sequence of any one of SEQ ID Nos: 1-100, 201-230, 262-287, 314, or 315 and the second nucleotide sequence comprises a nucleotide sequence of any one of SEQ ID NOs: 101-200, 231-260, or 288-313.

[0911] Embodiment 103. A composition comprising the siNA molecule according to any preceding embodiment and a pharmaceutically acceptable excipient.

[0912] Embodiment 104. In embodiment 103, further comprising an additional liver disease treatment agent.

[0913] Embodiment 105. In embodiment 103 or 104, further comprising an additional siNA.

[0914] Embodiment 106. In any one of embodiments 103-105, further comprising a liver disease treatment agent. In some embodiments, the liver disease treatment agent may be selected from a peroxisome proliferator-activator receptor (PPAR) agonist, farnesoid X receptor (FXR) agonist, lipid-altering agent, and incretin-based therapy. In some embodiments, the liver disease treatment agent may be a PPAR agonist is selected from a PPARα agonist, dual PPARα/δ agonist, PPARγ agonist, and dual PPARα/γ agonist. In some embodiments, the liver disease treatment agent may be selected from a fibrate, elafibranor, thiazolidinedione (TZD), pioglitazone, saroglitazar, obeticholic acis (OCA), aramchol, glucagon-like peptide 1 (GLP-1) receptor agonist, dipeptidyl peptidase 4 (DPP-4) inhibitor, exenatide, liraglutide sitagliptin, and vildapliptin.

[0915] Embodiment 107. The composition according to any one of embodiments 103-106 for use as a medicament.

[0916] Embodiment 108. Use of the siNA molecule or the composition according to any preceding embodiment in the manufacture of a medicament for treating a disease.

[0917] Embodiment 109. Use of the siNA molecule or the composition according to any preceding embodiment in the treatment of a disease.

[0918] Embodiment 110. The siNA molecule according to any one of embodiments 1-102 for use as a medicament.

[0919] Embodiment 111. The siNA molecule according to any one of embodiments 1-102 for use in the treatment of a disease.

[0920] Embodiment 112. In any of embodiments 109-111, wherein the disease is a liver disease.

[0921] Embodiment 113. In any of embodiments 109-112, wherein the disease is a nonalcoholic fatty liver disease (NAFLD) or hepatocellular carcinoma (HCC).

[0922] Embodiment 114. In any of embodiments 109-113, wherein the disease is nonalcoholic steatohepatitis (NASH).

[0923] Embodiment 115. A short interfering nucleic acid (siNA) molecule comprising:
[0924] (a) a sense strand comprising a first nucleotide sequence that is at least about 60%, 65%, 70%, 75%, 80%, 85%, 90%, 95%, or 100% identical to an RNA corresponding to a target gene, wherein the first nucleotide sequence:
   [0925] (i) is 15 to 30 nucleotides in length; and
   [0926] (ii) comprises 15 or more modified nucleotides independently selected from a 2′-O-methyl nucleotide and a 2′-fluoro nucleotide, wherein at least one modified nucleotide is a 2′-O-methyl nucleotide and the nucleotide at position 3, 5, 7, 8, 9, 10, 11, 12, 14, 17, and/or 19 from the 5′ end of the first nucleotide sequence is a 2′-fluoro nucleotide; and
[0927] (b) an antisense strand comprising a second nucleotide sequence that is at least about 60%, 65%, 70%, 75%, 80%, 85%, 90%, 95%, or 100% complementary to the RNA corresponding to the target gene, wherein the second nucleotide sequence:
   [0928] (i) is 15 to 30 nucleotides in length; and
   [0929] (ii) comprises 15 or more modified nucleotides independently selected from a 2′-O-methyl nucleotide and a 2′-fluoro nucleotide, wherein at least one modified nucleotide is a 2′-O-methyl nucleotide and at least one modified nucleotide is a 2′-fluoro nucleotide;
      wherein the first nucleotide sequence comprises a nucleotide sequence of any one of SEQ ID Nos: 1-100, 201-230, 262-287, 314, or 315, the second nucleotide sequence comprises a nucleotide sequence of any one of SEQ ID NOs: 101-200, 231-260, or 288-313, or a combination thereof.

[0930] Embodiment 116. A short interfering nucleic acid (siNA) molecule comprising:
[0931] (a) a sense strand comprising a first nucleotide sequence that is at least about 60%, 65%, 70%, 75%, 80%, 85%, 90%, 95%, or 100% identical to an RNA corresponding to a target gene, wherein the first nucleotide sequence:
   [0932] (i) is 15 to 30 nucleotides in length; and
   [0933] (ii) comprises 15 or more modified nucleotides independently selected from a 2′-O-methyl nucleotide and a 2′-fluoro nucleotide, wherein at least one modified nucleotide is a 2′-O-methyl nucleotide and the nucleotide at position 3, 5, 7, 8, 9, 10, 11, 12, 14, 17, and/or 19 from the 5′ end of the first nucleotide sequence is a 2′-fluoro nucleotide; and
[0934] (b) an antisense strand comprising a second nucleotide sequence that is at least about 60%, 65%, 70%, 75%, 80%, 85%, 90%, 95%, or 100% complementary to the RNA corresponding to the target gene, wherein the second nucleotide sequence:
   [0935] (i) is 15 to 30 nucleotides in length; and
   [0936] (ii) comprises 15 or more modified nucleotides independently selected from a 2′-O-methyl nucleotide and a 2′-fluoro nucleotide, wherein at least one modified nucleotide is a 2′-O-methyl nucleotide and at least one modified nucleotide is a 2′-fluoro nucleotide;
      wherein the siNA reduces or inhibits the production of a hydroxysteroid dehydrogenase.

[0937] Embodiment 117. The siNA molecule according to Embodiment 115 or Embodiment 116, wherein the first nucleotide sequence comprises 16, 17, 18, 19, 20, 21, 22, 23, or more modified nucleotides independently selected from a 2′-O-methyl nucleotide and a 2′-fluoro nucleotide;

optionally wherein:
[0938] 70%, 75%, 80%, 85%, 90%, 95% or 100% of the nucleotides in the first nucleotide sequence are modified nucleotides independently selected from a 2′-O-methyl nucleotide and a 2′-fluoro nucleotide;
[0939] at least 2, 3, 4, 5, or 6 modified nucleotides of the first nucleotide sequence are 2′-fluoro nucleotides;
[0940] no more than 10, 9, 8, 7, 6, 5, 4, 3, or 2 modified nucleotides of the first nucleotide sequence are 2′-fluoro nucleotides;
[0941] at least 10, 11, 12, 13, 14, 15, 16, 17, 18, 19, 20, 21, or 22 modified nucleotides of the first nucleotide sequence are 2′-O-methyl nucleotides; and/or
[0942] no more than 25, 24, 23, 22, 21, 20, 19, 18, 17, 16, 15, 14, 13, 12, 11, 10, 9, 8, 7, 6, 5, 4, 3, or 2 modified nucleotides of the first nucleotide sequence are 2′-O-methyl nucleotides.

[0943] Embodiment 118. The siNA molecule according to any one of Embodiments 115-117, wherein the second nucleotide sequence comprises 16, 17, 18, 19, 20, 21, 22, 23, or more modified nucleotides independently selected from a 2′-O-methyl nucleotide and a 2′-fluoro nucleotide; optionally wherein:
[0944] 70%, 75%, 80%, 85%, 90%, 95% or 100% of the nucleotides in the second nucleotide sequence are modified nucleotides independently selected from a 2′-O-methyl nucleotide and a 2′-fluoro nucleotide;
[0945] at least 2, 3, 4, 5, or 6 modified nucleotides of the second nucleotide sequence are 2′-fluoro nucleotides;
[0946] less than or equal to 10, 9, 8, 7, 6, 5, 4, 3, or 2 modified nucleotides of the second nucleotide sequence are 2′-fluoro nucleotides;
[0947] at least 10, 11, 12, 13, 14, 15, 16, 17, 18, 19, 20, 21, or 22 modified nucleotides of the second nucleotide sequence are 2′-O-methyl nucleotides; and/or
[0948] less than or equal to 25, 24, 23, 22, 21, 20, 19, 18, 17, 16, 15, 14, 13, 12, 11, 10, 9, 8, 7, 6, 5, 4, 3, or 2 modified nucleotides of the second nucleotide sequence are 2′-O-methyl nucleotides.

[0949] Embodiment 119. The siNA molecule according to any one of Embodiments 115-118, wherein at least:
[0950] 1, 2, 3, 4, 5, 6, or 7 nucleotides at position 3, 5, 7, 8, 9, 10, 11, 12, and/or 17 from the 5′ end of the first nucleotide sequence is a 2′-fluoro nucleotide; and/or
[0951] 1, 2, 3, 4, 5, 6, 7, 8, or 9 nucleotides at position 2, 5, 6, 8, 10, 14, 16, 17, and/or 18 from the 5′ end of the second nucleotide sequence is a 2′-fluoro nucleotide.

[0952] Embodiment 120. The siNA molecule according to any one of Embodiments 115-119, wherein:
[0953] (i) the nucleotides in the second nucleotide sequence are arranged in an alternating 1:3 modification pattern, and
[0954] (ii) 1 nucleotide is a 2′-fluoro nucleotide and 3 nucleotides are 2′-O-methyl nucleotides; optionally wherein the alternating 1:3 modification pattern occurs 2-5 times.

[0955] Embodiment 121. The siNA molecule according to any one of Embodiments 115-119, wherein:
[0956] (i) the nucleotides in the second nucleotide sequence are arranged in an alternating 1:2 modification pattern, and
[0957] (ii) 1 nucleotide is a 2′-fluoro nucleotide and 2 nucleotides are 2′-O-methyl nucleotides; optionally wherein the alternating 1:2 modification pattern occurs 2-5 times.

[0958] Embodiment 122. A short interfering nucleic acid (siNA) molecule represented by Formula (VIII):

5′-Aₙ¹Bₙ²Aₙ³Bₙ⁴Aₙ⁵Bₙ⁶Aₙ⁷Bₙ⁸Aₙ⁹-3′
3′-C_{q}¹A_{q}²B_{q}³A_{q}⁴B_{q}⁵A_{q}⁶B_{q}⁷A_{q}⁸B_{q}⁹A_{q}¹⁰B_{q}¹¹A_{q}¹²-5′

wherein:
[0959] the top strand is a sense strand comprising a first nucleotide sequence that is at least about 60%, 65%, 70%, 75%, 80%, 85%, 90%, 95%, or 100% identical to an RNA corresponding to a target gene, wherein the first nucleotide sequence comprises 15 to 30 nucleotides;
[0960] the bottom strand is an antisense strand comprising a second nucleotide sequence that is at least about 60%, 65%, 70%, 75%, 80%, 85%, 90%, 95%, or 100% complementary to the RNA corresponding to the target gene, wherein the second nucleotide sequence comprises 15 to 30 nucleotides;
[0961] each A is independently a 2′-O-methyl nucleotide or a nucleotide comprising a 5′-stabilized end cap or a phosphorylation blocker;
[0962] B is a 2′-fluoro nucleotide;
[0963] C represents overhanging nucleotides and is a 2′-O-methyl nucleotide, deoxy nucleotide, or uracil;
[0964] n¹=1-6 nucleotides in length;
[0965] each n², n⁶, n⁸, q³, q⁵, q⁷, q⁹, q¹¹, and q¹² is independently 0-1 nucleotides in length;
[0966] each n³ and n⁴ is independently 1-3 nucleotides in length;
[0967] n⁵ is 1-10 nucleotides in length;
[0968] n⁷ is 0-4 nucleotides in length;
[0969] each n⁹, q¹, and q² is independently 0-2 nucleotides in length;
[0970] q⁴ is 0-3 nucleotides in length;
[0971] q⁶ is 0-5 nucleotides in length;
[0972] q⁸ is 2-7 nucleotides in length; and
[0973] q¹⁰ is 2-11 nucleotides in length;
[0974] wherein the first nucleotide sequence comprises a nucleotide sequence of any one of SEQ ID Nos: 1-100, 201-230, 262-287, 314, or 315, the second nucleotide sequence comprises a nucleotide sequence of any one of SEQ ID NOs: 101-200, 231-260, or 288-313, or any combination thereof.

[0975] Embodiment 123. A short interfering nucleic acid (siNA) molecule represented by Formula (VIII):

5′-Aₙ¹Bₙ²Aₙ³Bₙ⁴Aₙ⁵Bₙ⁶Aₙ⁷Bₙ⁸Aₙ⁹-3′
3′-C_{q}¹A_{q}²B_{q}³A_{q}⁴B_{q}⁵A_{q}⁶B_{q}⁷A_{q}⁸B_{q}⁹A_{q}¹⁰B_{q}¹¹A_{q}¹²-5′

wherein:
[0976] the top strand is a sense strand comprising a first nucleotide sequence that is at least about 60%, 65%, 70%, 75%, 80%, 85%, 90%, 95%, or 100% identical to an RNA corresponding to a target gene, wherein the first nucleotide sequence comprises 15 to 30 nucleotides;
[0977] the bottom strand is an antisense strand comprising a second nucleotide sequence that is at least about 60%, 65%, 70%, 75%, 80%, 85%, 90%, 95%, or 100% complementary to the RNA corresponding to the target gene, wherein the second nucleotide sequence comprises 15 to 30 nucleotides;
[0978] each A is independently a 2′-O-methyl nucleotide or a nucleotide comprising a 5′-stabilized end cap or a phosphorylation blocker;
[0979] B is a 2′-fluoro nucleotide;
[0980] C represents overhanging nucleotides and is a 2′-O-methyl nucleotide, deoxy nucleotide, or uracil;
[0981] n¹=1-6 nucleotides in length;
[0982] each n², n⁶, n⁸, q³, q⁵, q⁷, q⁹, q¹¹, and q¹² is independently 0-1 nucleotides in length;
[0983] each n³ and n⁴ is independently 1-3 nucleotides in length;
[0984] n⁵ is 1-10 nucleotides in length;
[0985] n⁷ is 0-4 nucleotides in length;
[0986] each n⁹, q¹, and q² is independently 0-2 nucleotides in length;
[0987] q⁴ is 0-3 nucleotides in length;
[0988] q⁶ is 0-5 nucleotides in length;
[0989] q⁸ is 2-7 nucleotides in length; and
[0990] q¹⁰ is 2-11 nucleotides in length;
   wherein the siNA reduces or inhibits the production of a hydroxysteroid dehydrogenase

[0991] Embodiment 124. The siNA molecule according to Embodiment 123 represented by Formula (IX):

5′-A₂₋₆B₁A₁₋₃B₂₋₃A₂₋₁₀B₀₋₁A₀₋₄B₀₋₁A₀₋₂-3′
3′-C₂A₀₋₂B₀₋₁A₀₋₃B₀₋₁A₀₋₅B₀₋₁A₂₋₇B₁A₂₋₁₁B₁A₁-5′

wherein:
[0992] the top strand is a sense strand comprising a first nucleotide sequence that is at least about 60%, 65%, 70%, 75%, 80%, 85%, 90%, 95%, or 100% identical to an RNA corresponding to a target gene, wherein the first nucleotide sequence comprises 15 to 30 nucleotides;
[0993] the bottom strand is an antisense strand comprising a second nucleotide sequence that is at least about 60%, 65%, 70%, 75%, 80%, 85%, 90%, 95%, or 100% complementary to the RNA corresponding to the target gene, wherein the second nucleotide sequence comprises 15 to 30 nucleotides;
[0994] each A is independently a 2′-O-methyl nucleotide or a nucleotide comprising a 5′-stabilized end cap or a phosphorylation blocker;
[0995] B is a 2′-fluoro nucleotide;
[0996] C represents overhanging nucleotides and is a 2′-O-methyl nucleotide, deoxy nucleotide, or uracil.

[0997] Embodiment 125. The siNA molecule according to Embodiment 123 or Embodiment 124
[0998] a. a sense strand comprising a first nucleotide sequence consisting of 17 to 23 nucleotides, wherein 2′-fluoro nucleotides are at positions 3, 7-9, 12, and 17 from the 5′ end of the first nucleotide sequence, and wherein 2′-O-methyl nucleotides are at positions 1, 2, 4-6, 10, 11, and 13-16 from the 5′ end of the first nucleotide sequence; and
[0999] b. an antisense strand comprising a second nucleotide sequence consisting of 17 to 23 nucleotides, wherein:
   [1000] 2′-fluoro nucleotides are at positions 2 and 14 from the 5′ end of the second nucleotide sequence, and wherein 2′-O-methyl nucleotides are at positions 1, 3-13, and 15-17 from the 5′ end of the second nucleotide sequence; or
   [1001] the nucleotides in the second nucleotide sequence are arranged in an alternating 1:3 modification pattern, and wherein 1 nucleotide is a 2′-fluoro nucleotide and 3 nucleotides are 2′-O-methyl nucleotides; or
   [1002] the nucleotides in the second nucleotide sequence are arranged in an alternating 1:2 modification pattern, and wherein 1 nucleotide is a 2′-fluoro nucleotide and 2 nucleotides are 2′-O-methyl nucleotides;
      optionally wherein:
[1003] the first nucleotide sequence consists of 19 nucleotides;
[1004] 2′-O-methyl nucleotides are at positions 18 and 19 from the 5′ end of the first nucleotide sequence;
[1005] the second nucleotide sequence consists of 21 nucleotides; and/or
[1006] 2′-O-methyl nucleotides are at positions 18-21 or 19-21 from the 5′ end of the second nucleotide sequence.

[1007] Embodiment 126. The siNA molecule according to Embodiment 123 or Embodiment 124
[1008] c. a sense strand comprising a first nucleotide sequence consisting of 17 to 23 nucleotides, wherein 2′-fluoro nucleotides are at positions 3, 7, 8, and 17 from the 5′ end of the first nucleotide sequence, and wherein 2′-O-methyl nucleotides are at positions 1, 2, 4-6, and 9-16 from the 5′ end of the first nucleotide sequence; and
[1009] d. an antisense strand comprising a second nucleotide sequence consisting of 17 to 23 nucleotides, wherein:
   [1010] 2′-fluoro nucleotides are at positions 2 and 14 from the 5′ end of the second nucleotide sequence, and wherein 2′-O-methyl nucleotides are at positions 1, 3-13, and 15-17 from the 5′ end of the second nucleotide sequence; or
   [1011] the nucleotides in the second nucleotide sequence are arranged in an alternating 1:3 modification pattern, and wherein 1 nucleotide is a 2′-fluoro nucleotide and 3 nucleotides are 2′-O-methyl nucleotides; or
   [1012] the nucleotides in the second nucleotide sequence are arranged in an alternating 1:2 modification pattern, and wherein 1 nucleotide is a 2′-fluoro nucleotide and 2 nucleotides are 2′-O-methyl nucleotides;
      optionally wherein:
[1013] the first nucleotide sequence consists of 19 nucleotides;
[1014] 2′-O-methyl nucleotides are at positions 18 and 19 from the 5′ end of the first nucleotide sequence;
[1015] the second nucleotide sequence consists of 21 nucleotides; and/or
[1016] 2′-O-methyl nucleotides are at positions 18-21 or 19-21 from the 5′ end of the second nucleotide sequence.

[1017] Embodiment 127. The siNA molecule according to Embodiment 123 or Embodiment 124
[1018] e. a sense strand comprising a first nucleotide sequence consisting of 17 to 23 nucleotides, wherein 2′-fluoro nucleotides are at positions 3, 7-9, and 17 from the 5′ end of the first nucleotide sequence, and wherein 2′-O-methyl nucleotides are at positions 1, 2, 4-6, and 10-16 from the 5′ end of the first nucleotide sequence; and
[1019] f. an antisense strand comprising a second nucleotide sequence consisting of 17 to 23 nucleotides, wherein:
   [1020] 2′-fluoro nucleotides are at positions 2, 6, 10, and 14 from the 5′ end of the second nucleotide sequence, and wherein 2′-O-methyl nucleotides are at positions 1, 3-5, 7-9, 11-13, and 15-17 from the 5′ end of the second nucleotide sequence; or
   [1021] the nucleotides in the second nucleotide sequence are arranged in an alternating 1:3 modification pattern, and wherein 1 nucleotide is a 2′-fluoro nucleotide and 3 nucleotides are 2′-O-methyl nucleotides; or
   [1022] the nucleotides in the second nucleotide sequence are arranged in an alternating 1:2 modification pattern, and wherein 1 nucleotide is a 2′-fluoro nucleotide and 2 nucleotides are 2′-O-methyl nucleotides;
      optionally wherein:
[1023] the first nucleotide sequence consists of 19 nucleotides;
[1024] 2′-O-methyl nucleotides are at positions 18 and 19 from the 5′ end of the first nucleotide sequence;
[1025] the second nucleotide sequence consists of 21 nucleotides; and/or
[1026] 2′-O-methyl nucleotides are at positions 19-21 from the 5′ end of the second nucleotide sequence.

[1027] Embodiment 128. The siNA molecule according to Embodiment 123 or Embodiment 124
[1028] g. a sense strand comprising a first nucleotide sequence consisting of 17 to 23 nucleotides, wherein 2′-fluoro nucleotides are at positions 5 and 7-9 from the 5′ end of the first nucleotide sequence, and wherein 2′-O-methyl nucleotides are at positions 1-4, 6, and 10-17 from the 5′ end of the first nucleotide sequence; and
[1029] h. an antisense strand comprising a second nucleotide sequence consisting of 17 to 23 nucleotides, wherein:
   [1030] 2′-fluoro nucleotides are at positions 2, 6, 10, and 14 from the 5′ end of the second nucleotide sequence, and wherein 2′-O-methyl nucleotides are at positions 1, 3-5, 7-9, 11-13 and 15-17 from the 5′ end of the second nucleotide sequence; or
   [1031] the nucleotides in the second nucleotide sequence are arranged in an alternating 1:3 modification pattern, and wherein 1 nucleotide is a 2′-fluoro nucleotide and 3 nucleotides are 2′-O-methyl nucleotides; or
   [1032] the nucleotides in the second nucleotide sequence are arranged in an alternating 1:2 modification pattern, and wherein 1 nucleotide is a 2′-fluoro nucleotide and 2 nucleotides are 2′-O-methyl nucleotides;
      optionally wherein:
[1033] the first nucleotide sequence consists of 19 nucleotides;
[1034] 2′-O-methyl nucleotides are at positions 18 and 19 from the 5′ end of the first nucleotide sequence;
[1035] the second nucleotide sequence consists of 21 nucleotides;
[1036] 2′-fluoro nucleotide is at position 18 from the 5′ end of the second nucleotide sequence; and/or
[1037] 2′-O-methyl nucleotides are at positions 19-21 from the 5′ end of the second nucleotide sequence.

[1038] Embodiment 129. The siNA molecule according to Embodiment 123 or Embodiment 124
[1039] i. a sense strand comprising a first nucleotide sequence consisting of 17 to 23 nucleotides, wherein 2′-fluoro nucleotides are at positions 5 and 7-9 from the 5′ end of the first nucleotide sequence, and wherein 2′-O-methyl nucleotides are at positions 1-4, 6, and 10-17 from the 5′ end of the first nucleotide sequence; and
[1040] j. an antisense strand comprising a second nucleotide sequence consisting of 17 to 23 nucleotides, wherein:
   [1041] 2′-fluoro nucleotides are at positions 2, 5, 8, 14, and 17 from the 5′ end of the first nucleotide sequence, and wherein 2′-O-methyl nucleotides are at positions 1, 3, 4, 6, 7, 9-13, 15, and 16 from the 5′ end of the first nucleotide sequence; or
   [1042] the nucleotides in the second nucleotide sequence are arranged in an alternating 1:3 modification pattern, and wherein 1 nucleotide is a 2′-fluoro nucleotide and 3 nucleotides are 2′-O-methyl nucleotides; or
   [1043] the nucleotides in the second nucleotide sequence are arranged in an alternating 1:2 modification pattern, and wherein 1 nucleotide is a 2′-fluoro nucleotide and 2 nucleotides are 2′-O-methyl nucleotides;
      optionally wherein:
[1044] the first nucleotide sequence consists of 19 nucleotides;
[1045] 2′-O-methyl nucleotides are at positions 18 and 19 from the 5′ end of the first nucleotide sequence;
[1046] the second nucleotide sequence consists of 21 nucleotides; and/or
[1047] 2′-O-methyl nucleotides are at positions 18-21 or 19-21 from the 5′ end of the second nucleotide sequence.

[1048] Embodiment 130. The siNA molecule according to Embodiment 123 or Embodiment 124
[1049] k. a sense strand comprising a first nucleotide sequence consisting of 17 to 23 nucleotides, wherein 2′-fluoro nucleotides are at positions 5 and 7-9 from the 5′ end of the first nucleotide sequence, and wherein 2′-O-methyl nucleotides are at positions 1-4, 6, and 10-17 from the 5′ end of the first nucleotide sequence; and
[1050] l. an antisense strand comprising a second nucleotide sequence consisting of 17 to 23 nucleotides, wherein:
   [1051] 2′-fluoro nucleotides are at positions 2, 6, 14, and 16 from the 5′ end of the second nucleotide sequence, and wherein 2′-O-methyl nucleotides are at positions 1, 3-5, 7-13, 15, and 17 from the 5′ end the second nucleotide sequence; or
   [1052] the nucleotides in the second nucleotide sequence are arranged in an alternating 1:3 modification pattern, and wherein 1 nucleotide is a 2′-fluoro nucleotide and 3 nucleotides are 2′-O-methyl nucleotides; or
   [1053] the nucleotides in the second nucleotide sequence are arranged in an alternating 1:2 modification pattern, and wherein 1 nucleotide is a 2′-fluoro nucleotide and 2 nucleotides are 2′-O-methyl nucleotides;
      optionally wherein:
[1054] first nucleotide sequence consists of 19 nucleotides;
[1055] 2′-O-methyl nucleotides are at positions 18 and 19 from the 5′ end of the first nucleotide sequence;
[1056] the second nucleotide sequence consists of 21 nucleotides; and/or
[1057] 2′-O-methyl nucleotides are at positions 18-21 or 19-21 from the 5′ end of the second nucleotide sequence.

[1058] Embodiment 131. The siNA molecule according to Embodiment 123 or Embodiment 124
[1059] m. a sense strand comprising a first nucleotide sequence consisting of 17 to 23 nucleotides, wherein 2′-fluoro nucleotides are at positions 5, 9-11, and 14 from the 5′ end of the first nucleotide sequence, and wherein 2′-O-methyl nucleotides are at positions 1-4, 6-8, 12, 13, and 15-17 from the 5′ end of the first nucleotide sequence; and
[1060] n. an antisense strand comprising a second nucleotide sequence consisting of 17 to 23 nucleotides, wherein:
   [1061] 2′-fluoro nucleotides are at positions 2 and 14 from the 5′ end of the second nucleotide sequence, and wherein 2′-O-methyl nucleotides are at positions 1, 3-13, and 15-17 from the 5′ end the second nucleotide sequence; or
   [1062] the nucleotides in the second nucleotide sequence are arranged in an alternating 1:3 modification pattern, and wherein 1 nucleotide is a 2′-fluoro nucleotide and 3 nucleotides are 2′-O-methyl nucleotides; or
   [1063] the nucleotides in the second nucleotide sequence are arranged in an alternating 1:2 modification pattern, and wherein 1 nucleotide is a 2′-fluoro nucleotide and 2 nucleotides are 2′-O-methyl nucleotides;
      optionally wherein:
[1064] the first nucleotide sequence consists of 21 nucleotides;
[1065] 2′-O-methyl nucleotides are at positions 18, 20, and 21 from the 5′ end of the first nucleotide sequence;
[1066] 2′-fluoro nucleotide is at position 19 from the 5′ end of the first nucleotide sequence; the second nucleotide sequence consists of 23 nucleotides; and/or
[1067] 2′-O-methyl nucleotides are at positions 18-23 from the 5′ end of the second nucleotide sequence.

[1068] Embodiment 132. The siNA molecule according to Embodiment 123 or Embodiment 124
[1069] o. a sense strand comprising a first nucleotide sequence consisting of 17 to 23 nucleotides, wherein 2′-fluoro nucleotides are at positions 7 and 9-11 from the 5′ end of the first nucleotide sequence, and wherein 2′-O-methyl nucleotides are at positions 1-6, 8, and 12-17 from the 5′ end of the first nucleotide sequence; and
[1070] p. an antisense strand comprising a second nucleotide sequence consisting of 17 to 23 nucleotides, wherein:
   [1071] 2′-fluoro nucleotides are at positions 2, 6, 14, and 16 from the 5′ end of the second nucleotide sequence, and wherein 2′-O-methyl nucleotides are at positions 1, 3-5, 7-13, 15, and 17 from the 5′ end the second nucleotide sequence; or
   [1072] the nucleotides in the second nucleotide sequence are arranged in an alternating 1:3 modification pattern, and wherein 1 nucleotide is a 2′-fluoro nucleotide and 3 nucleotides are 2′-O-methyl nucleotides; or
   [1073] the nucleotides in the second nucleotide sequence are arranged in an alternating 1:2 modification pattern, and wherein 1 nucleotide is a 2′-fluoro nucleotide and 2 nucleotides are 2′-O-methyl nucleotides;
      optionally wherein:
[1074] the first nucleotide sequence consists of 21 nucleotides;
[1075] 2′-O-methyl nucleotides are at positions 18-21 from the 5′ end of the first nucleotide sequence;
[1076] the second nucleotide sequence consists of 23 nucleotides; and/or
[1077] 2′-O-methyl nucleotides are at positions 18-21 from the 5′ end of the second nucleotide sequence.

[1078] Embodiment 133. The siNA molecule according to any preceding Embodiment, wherein the sense strand further comprises TT sequence adjacent to the first nucleotide sequence, the antisense strand further comprises TT sequence adjacent to the second nucleotide sequence, or a combination thereof.

[1079] Embodiment 134. The siNA molecule according to any preceding Embodiment, wherein the first nucleotide sequence further comprises 1 or more phosphorothioate internucleoside linkages, the second nucleotide sequence further comprises 1 or more phosphorothioate internucleoside linkages, or a combination thereof;

optionally wherein:
[1080] the sense strand comprises at least 1, 2, 3, 4, 5, 6, 7, 8, 9, 10, 11, 12, 13, 14, 15 or more phosphorothioate internucleoside linkages;
[1081] the antisense strand further comprises at least 1, 2, 3, 4, 5, 6, 7, 8, 9, 10, 11, 12, 13, 14, 15 or more phosphorothioate internucleoside linkages;

[1082] Embodiment 135. The siNA molecule of Embodiment 134, wherein:
[1083] (i) at least one phosphorothioate internucleoside linkage is between the nucleotides at positions 1 and 2 from the 5′ end of the first nucleotide sequence and/or second nucleotide sequence; and/or
[1084] (ii) at least one phosphorothioate internucleoside linkage is between the nucleotides at positions 2 and 3 from the 5′ end of the first nucleotide sequence and/or second nucleotide sequence; and/or
[1085] (iii) at least one phosphorothioate internucleoside linkage is between the nucleotides at positions 1 and 2 from the 3′ end of the first nucleotide sequence and/or second nucleotide sequence; and/or
[1086] (iv) at least one phosphorothioate internucleoside linkage is between the nucleotides at positions 2 and 3 from the 3′ end of the first nucleotide sequence and/or second nucleotide sequence.

[1087] Embodiment 136. The siNA molecule according to any preceding Embodiment, wherein the first nucleotide sequence further comprises 1 or more mesyl phosphoroamidate internucleoside linkages, the second nucleotide sequence further comprises 1 or more mesyl phosphoroamidate internucleoside linkages, or a combination thereof;

optionally wherein:
[1088] the sense strand comprises at least 1, 2, 3, 4, 5, 6, 7, 8, 9, 10, 11, 12, 13, 14, 15 or more mesyl phosphoroamidate internucleoside linkages;
[1089] the antisense strand further comprises at least 1, 2, 3, 4, 5, 6, 7, 8, 9, 10, 11, 12, 13, 14, 15 or more mesyl phosphoroamidate internucleoside linkages;

[1090] Embodiment 137. The siNA molecule of Embodiment 136, wherein:
[1091] (i) at least one mesyl phosphoroamidate internucleoside linkage is between the nucleotides at positions 1 and 2 from the 5′ end of the first nucleotide sequence and/or second nucleotide sequence;
[1092] (ii) at least one mesyl phosphoroamidate internucleoside linkage is between the nucleotides at positions 2 and 3 from the 5′ end of the first nucleotide sequence and/or second nucleotide sequence;
[1093] (iii) at least one mesyl phosphoroamidate internucleoside linkage is between the nucleotides at positions 1 and 2 from the 3′ end of the first nucleotide sequence and/or second nucleotide sequence; and/or
[1094] (iv) at least one mesyl phosphoroamidate internucleoside linkage is between the nucleotides at positions 2 and 3 from the 3′ end of the first nucleotide sequence and/or second nucleotide sequence.

[1095] Embodiment 138. The siNA molecule according to any preceding Embodiment, wherein the sense strand further comprises a stabilizing end cap, antisense strand further comprises a stabilizing end cap, or a combination thereof.

[1096] Embodiment 139. The siNA molecule according to Embodiment 138 comprising a 5′-stabilized end cap of Formula (I′):

[chemical structure]

wherein:
[1097] R¹ is a nucleobase, aryl, heteroaryl, or H,
[1098] R²⁶ is

[chemical structure]

[1099] —CH═CD-Z, —CD═CH—Z, —CD═CD-Z, —(CR²¹R²²)ₙ—Z, or —(C₂-C₆ alkenylene)-Z and R²⁰ is hydrogen; or
[1100] R²⁶ and R²⁰ together form a 3- to 7-membered carbocyclic ring substituted with —(CR²¹R²²)ₙ—Z or —(C₂-C₆ alkenylene)-Z;
[1101] n is 1, 2, 3, or 4;
[1102] Z is —ONR²³R²⁴, —OP(O)OH(CH₂)ₘCO₂R²³, —OP(S)OH(CH₂)ₘCO₂R²³, —P(O)(OH)₂, —P(O)(OH)(OCH₃), —P(O)(OH)(OCD₃), —SO₂ (CH₂)ₘP(O)(OH)₂, —SO₂NR²³R²⁵, —NR²³R²⁴,
[1103] R²¹ and R²² are independently hydrogen or C₁-C₆ alkyl; R²¹ and R²² together form an oxo group;
[1104] R²³ is hydrogen or C₁-C₆ alkyl;
[1105] R²⁴ is-SO₂R²⁵ or —C(O)R²⁵; or
[1106] R²³ and R²⁴ together with the nitrogen to which they are attached form a substituted or unsubstituted heterocyclic ring;
[1107] R²⁵ is C₁-C₆ alkyl;
[1108] R¹⁰⁰ is —OCH₃, —OCD₃, or —F; and
[1109] m is 1, 2, 3, or 4.

[1110] Embodiment 140. The siNA molecule according to Embodiment 138 or Embodiment 139, wherein the 5′-stabilized end cap comprises a 5′ vinyl phosphonate or deuterated 5′ vinyl phosphonate.

[1111] Embodiment 141. The siNA molecule according to Embodiment 138 comprising a 5′-stabilized end cap of Formula (IIA) or (IIB):

[chemical structure]

wherein R¹ is a nucleobase, aryl, heteroaryl, or H.

[1112] Embodiment 142. The siNA molecule according to Embodiment 135 comprising a 5′-stabilized end cap of Formula (IIIA) or (IIIB):

[chemical structure]

wherein R¹ is a nucleobase, aryl, heteroaryl, or H; and R¹⁵ is H or CH₃.

[1113] Embodiment 143. The siNA molecule according to any preceding Embodiment, wherein the sense strand further comprises a phosphorylation blocker, antisense strand further comprises a phosphorylation blocker, or a combination thereof.

[1114] Embodiment 144. The siNA molecule according to Embodiment 143, wherein the phosphorylation blocker is a phosphorylation blocker of Formula (IV):

[chemical structure]

wherein:
[1115] R¹ is a nucleobase,
[1116] R⁴ is —O—R³⁰ or —NR³¹R³²,
[1117] R³⁰ is C₁-C₈ substituted or unsubstituted alkyl; and
[1118] R³¹ and R³² together with the nitrogen to which they are attached form a substituted or unsubstituted heterocyclic ring.

[1119] Embodiment 145. The siNA molecule according to any preceding Embodiment, comprising at least one modified nucleotide of Formula (IV):

[chemical structure]

[1120] Embodiment 146. The siNA molecule according to any preceding Embodiment, wherein the siNA further comprises a galactosamine.

[1121] Embodiment 147. The siNA molecule of Embodiment 146, wherein the galactosamine is N-acetylgalactosamine (GalNAc) of Formula (VI) or Formula (VII):

[chemical structure]

wherein:
[1122] m is 1, 2, 3, 4, or 5;
[1123] each n is independently 1 or 2;
[1124] p is 0 or 1;
[1125] each R is independently H;
[1126] each Y is independently selected from —O—P(═O)(SH)—, —O—P(═O)(O)—, —O—P(═O)(OH)—, and —O—P(S)S—;
[1127] Z is H or a second protecting group;
[1128] either L is a linker or L and Y in combination are a linker; and
[1129] A is H, OH, a third protecting group, an activated group, or an oligonucleotide.

[1130] Embodiment 148. The siNA molecule according to any preceding Embodiment, wherein the antisense strand, sense strand, first nucleotide sequence, and/or second nucleotide sequence comprises at least one thermally destabilizing nucleotide selected from:

[chemical structure]

or a combination thereof.

[1131] Embodiment 149. The siNA molecule according to any preceding Embodiment, wherein at least one 2′-fluoro nucleotide or 2′-O-methyl nucleotide is a 2′-fluoro or 2-O-methyl nucleotide mimic of Formula (V):

[chemical structure]

wherein
[1132] R¹ is independently a nucleobase, aryl, heteroaryl, or H,
[1133] Q¹ and Q² are independently S or O,
[1134] R⁵ is independently —OCD₃, —F, or —OCH₃, and
[1135] R⁶ and R⁷ are independently H, D, or CD₃.

[1136] Embodiment 150. The siNA molecule according to any preceding Embodiment, wherein:
[1137] (i) at least one end of the siNA is a blunt end;
[1138] (ii) at least one end of the siNA comprises an overhang, wherein the overhang comprises at least one nucleotide; or
[1139] (iii) both ends of the siNA comprise an overhang, wherein the overhang comprises at least one nucleotide.

[1140] Embodiment 151. The siNA molecule according to any preceding Embodiment, wherein the target gene is a hydroxysteroid 17-beta dehydrogenase 13 (HSD17B13).

[1141] Embodiment 152. The siNA molecule according to any preceding Embodiment, wherein the first nucleotide sequence comprises a nucleotide sequence of any one of SEQ ID Nos: 1-100, 201-230, 262-287, 314, or 315 and the second nucleotide sequence comprises a nucleotide sequence of any one of SEQ ID NOs: 101-200, 231-260, or 288-313.

[1142] Embodiment 153. A composition comprising the siNA molecule according to any preceding Embodiment and a pharmaceutically acceptable excipient.

[1143] Embodiment 154. The composition according to Embodiment 153 further comprising:
[1144] (i) an additional liver disease treatment agent; and/or
[1145] (ii) an additional siNA.

[1146] Embodiment 155. Use of the siNA molecule or the composition according to any preceding Embodiment in the manufacture of a medicament for treating a disease.

[1147] Embodiment 156. The use of Embodiment 155, wherein:
[1148] (i) the disease is a liver disease;
[1149] (ii) the disease is a nonalcoholic fatty liver disease (NAFLD) or hepatocellular carcinoma (HCC); or
[1150] (iii) the disease is nonalcoholic steatohepatitis (NASH).

[1151] Embodiment 157. The use of Embodiment 155 or Embodiment 156, wherein the disease is nonalcoholic steatohepatitis (NASH).

[1152] Embodiment 158. The siNA according to any one of Embodiments 115-152 for use in the treatment of a disease.

[1153] Embodiment 159. The siNA of Embodiment 158, wherein:
[1154] (i) the disease is a liver disease;
[1155] (ii) the disease is a nonalcoholic fatty liver disease (NAFLD) or hepatocellular carcinoma (HCC); or
[1156] (iii) the disease is nonalcoholic steatohepatitis (NASH).

1. A double-stranded short interfering nucleic acid (siNA) molecule comprising:
(a) a sense strand comprising a nucleotide sequence that is at least about 60%, 65%, 70%, 75%, 80%, 85%, 90%, 95%, or 100% identical to a nucleotide sequence of any one of SEQ ID NOs: 1-100, 201-230, 262-287, 314-445, 576-603 or 638; and/or
(b) an antisense strand comprising a nucleotide sequence that is at least about 60%, 65%, 70%, 75%, 80%, 85%, 90%, 95%, or 100% identical to a nucleotide sequence of any one of SEQ ID NOs: 101-200, 231-260, 288-313, 446-575, 604-637 or 639-644,
wherein the siNA molecule downregulates expression of a hydroxysteroid 17-beta dehydrogenase 13 (HSD17B13) gene.

2. (canceled)

3. (canceled)

4. A double-stranded short interfering nucleic acid (siNA) molecule comprising:
(a) a sense strand comprising a nucleotide sequence of any one of SEQ ID NOs: 1-100, 201-230, 262-287, 314-445, 576-603 or 638 and/or
(b) an antisense strand comprising a nucleotide sequence of any one of SEQ ID NOs: 101-200, 231-260, 288-313, 446-575, 604-637 or 639-644,
wherein the siNA molecule downregulates expression of a hydroxysteroid 17-beta dehydrogenase 13 (HSD17B13) gene.

5. (canceled)

6. (canceled)

7. The siNA molecule according to claim 4, wherein the sense strand and/or the antisense strand comprises at least one modified nucleotide selected from the group consisting of 2′-O-methyl, a 2′-fluoro, a locked nucleic acid, a nucleoside analog, a 5′ terminal vinyl phosphonate, and a 5′ phosphorothioate internucleoside linkage.

8.-12. (canceled)

13. The siNA molecule according to claim 4, wherein the siNA molecule is selected from any one of siNA Duplex ID Nos. D1-D178 or MD1-MD178.

14. (canceled)

15. (canceled)

16. A pharmaceutical composition comprising the siNA molecule according to claim 4.

17. (canceled)

18. The pharmaceutical composition according to claim 16, further comprising at least one additional active agent, wherein the at least one additional active agent is a liver disease treatment agent.

19. The pharmaceutical composition of claim 18, wherein the liver disease treatment agent is selected from a peroxisome proliferator-activator receptor (PPAR) agonist, farnesoid X receptor (FXR) agonist, lipid-altering agent, incretin-based therapy, and thyroid hormone receptor (THR) modulator.

20.-34. (canceled)

35. A method of treating a liver disease in a subject in need thereof, comprising administering to the subject an amount of the siNA molecule according to claim 4.

36. A method of treating a liver disease in a subject in need thereof, comprising administering to the subject an amount of the pharmaceutical composition according to claim 16.

37. The method of claim 35, wherein the liver disease is a nonalcoholic fatty liver disease (NAFLD).

38. The method of claim 35, wherein the liver disease is nonalcoholic steatohepatitis (NASH).

39. The method according to claim 35, further comprising administering to the subject at least one additional active agent, wherein the at least one additional active agent is a liver disease treatment agent.

40.-103. (canceled)

104. A method of reducing the expression level of HSD17B13 in a subject in need thereof comprising administering to the subject an amount of the siNA molecule according to claim 4, thereby reducing the expression level of HSD17B13 in the subject.

105. A method of preventing at least one symptom of a liver disease in a subject in need thereof comprising administering to the subject an amount of the siNA molecule according to claim 4, thereby preventing at least one symptom of a liver disease in the subject.

106. The siNA molecule according to claim 4, further comprising a ligand.

107. (canceled)

108. The siNA molecule according to claim 106, wherein the ligand is

[chemical structure]

109. The siNA molecule according to claim 4, wherein the sense strand is selected from any one of SEQ ID NOs: 316-445, 576-603, or 638.

110. The siNA molecule according to claim 4, wherein the antisense strand is selected from any one of SEQ ID NOs: 446-575, 604-637 or 639-644.

111. A method of reducing the expression level of HSD17B13 in a subject in need thereof comprising administering to the subject an amount of the pharmaceutical composition according to claim 16, thereby reducing the expression level of HSD17B13 in the subject.

112. A method of preventing at least one symptom of a liver disease in a subject in need thereof comprising administering to the subject an amount of the pharmaceutical composition according to claim 16, thereby preventing at least one symptom of a liver disease in the subject.

The application's sequence listing, which the Patent Office published only in electronic form, follows.

SEQUENCE LISTING (644 sequences)

SEQ ID NO: 1 - RNA, 21 nt, synthetic construct
  source 1..21: mol_type = other RNA
catcatctactcctacttgga

SEQ ID NO: 2 - RNA, 21 nt, synthetic construct
  source 1..21: mol_type = other RNA
ctactcctacttggagtcgtt

SEQ ID NO: 3 - RNA, 21 nt, synthetic construct
  source 1..21: mol_type = other RNA
cctacttggagtcgttggtga

SEQ ID NO: 4 - RNA, 21 nt, synthetic construct
  source 1..21: mol_type = other RNA
ctacttggagtcgttggtgaa

SEQ ID NO: 5 - RNA, 21 nt, synthetic construct
  source 1..21: mol_type = other RNA
cttggagtcgttggtgaagtt

SEQ ID NO: 6 - RNA, 21 nt, synthetic construct
  source 1..21: mol_type = other RNA
tggagtcgttggtgaagtttt

SEQ ID NO: 7 - RNA, 21 nt, synthetic construct
  source 1..21: mol_type = other RNA
ttggtgaagtttttcattcct

SEQ ID NO: 8 - RNA, 21 nt, synthetic construct
  source 1..21: mol_type = other RNA
ggtgaagtttttcattcctca

SEQ ID NO: 9 - RNA, 21 nt, synthetic construct
  source 1..21: mol_type = other RNA
ggaataggcaggcagactact

SEQ ID NO: 10 - RNA, 21 nt, synthetic construct
  source 1..21: mol_type = other RNA
gaataggcaggcagactactt

SEQ ID NO: 11 - RNA, 21 nt, synthetic construct
  source 1..21: mol_type = other RNA
aataggcaggcagactactta

SEQ ID NO: 12 - RNA, 21 nt, synthetic construct
  source 1..21: mol_type = other RNA
ataggcaggcagactacttat

SEQ ID NO: 13 - RNA, 21 nt, synthetic construct
  source 1..21: mol_type = other RNA
aggcaggcagactacttatga

SEQ ID NO: 14 - RNA, 21 nt, synthetic construct
  source 1..21: mol_type = other RNA
ggcaggcagactacttatgaa

SEQ ID NO: 15 - RNA, 21 nt, synthetic construct
  source 1..21: mol_type = other RNA
tattggttctgtgggatatta

SEQ ID NO: 16 - RNA, 21 nt, synthetic construct
  source 1..21: mol_type = other RNA
ttggttctgtgggatattaat

SEQ ID NO: 17 - RNA, 21 nt, synthetic construct
  source 1..21: mol_type = other RNA
ggttctgtgggatattaataa

SEQ ID NO: 18 - RNA, 21 nt, synthetic construct
  source 1..21: mol_type = other RNA
atgtggtagactgcagcaaca

SEQ ID NO: 19 - RNA, 21 nt, synthetic construct
  source 1..21: mol_type = other RNA
ctgcagcaacagagaagagat

SEQ ID NO: 20 - RNA, 21 nt, synthetic construct
  source 1..21: mol_type = other RNA
aaatcaggtgaagaaagaagt

SEQ ID NO: 21 - RNA, 21 nt, synthetic construct
  source 1..21: mol_type = other RNA
gaagaaagaagtgggtgatgt

SEQ ID NO: 22 - RNA, 21 nt, synthetic construct
  source 1..21: mol_type = other RNA
ccaaggatgaagagattacca

SEQ ID NO: 23 - RNA, 21 nt, synthetic construct
  source 1..21: mol_type = other RNA
gaagagattaccaagacattt

SEQ ID NO: 24 - RNA, 21 nt, synthetic construct
  source 1..21: mol_type = other RNA
agagattaccaagacatttga

SEQ ID NO: 25 - RNA, 21 nt, synthetic construct
  source 1..21: mol_type = other RNA
gattaccaagacatttgaggt

SEQ ID NO: 26 - RNA, 21 nt, synthetic construct
  source 1..21: mol_type = other RNA
taccaagacatttgaggtcaa

SEQ ID NO: 27 - RNA, 21 nt, synthetic construct
  source 1..21: mol_type = other RNA
ccaagacatttgaggtcaaca

SEQ ID NO: 28 - RNA, 21 nt, synthetic construct
  source 1..21: mol_type = other RNA
tgaggtcaacatcctaggaca

SEQ ID NO: 29 - RNA, 21 nt, synthetic construct
  source 1..21: mol_type = other RNA
aggtcaacatcctaggacatt

SEQ ID NO: 30 - RNA, 21 nt, synthetic construct
  source 1..21: mol_type = other RNA
gtcaacatcctaggacatttt

SEQ ID NO: 31 - RNA, 21 nt, synthetic construct
  source 1..21: mol_type = other RNA
tcaacatcctaggacattttt

SEQ ID NO: 32 - RNA, 21 nt, synthetic construct
  source 1..21: mol_type = other RNA
catcctaggacatttttggat

SEQ ID NO: 33 - RNA, 21 nt, synthetic construct
  source 1..21: mol_type = other RNA
tcctaggacatttttggatca

SEQ ID NO: 34 - RNA, 21 nt, synthetic construct
  source 1..21: mol_type = other RNA
aggacatttttggatcacaaa

SEQ ID NO: 35 - RNA, 21 nt, synthetic construct
  source 1..21: mol_type = other RNA
ggacatttttggatcacaaaa

SEQ ID NO: 36 - RNA, 21 nt, synthetic construct
  source 1..21: mol_type = other RNA
tttttggatcacaaaagcact

SEQ ID NO: 37 - RNA, 21 nt, synthetic construct
  source 1..21: mol_type = other RNA
ttggatcacaaaagcacttct

SEQ ID NO: 38 - RNA, 21 nt, synthetic construct
  source 1..21: mol_type = other RNA
atcacaaaagcacttcttcca

SEQ ID NO: 39 - RNA, 21 nt, synthetic construct
  source 1..21: mol_type = other RNA
tcacaaaagcacttcttccat

SEQ ID NO: 40 - RNA, 21 nt, synthetic construct
  source 1..21: mol_type = other RNA
aagcacttcttccatcgatga

SEQ ID NO: 41 - RNA, 21 nt, synthetic construct
  source 1..21: mol_type = other RNA
agcacttcttccatcgatgat

SEQ ID NO: 42 - RNA, 21 nt, synthetic construct
  source 1..21: mol_type = other RNA
ttccatcgatgatggagagaa

SEQ ID NO: 43 - RNA, 21 nt, synthetic construct
  source 1..21: mol_type = other RNA
catcgtcacagtggcttcagt

SEQ ID NO: 44 - RNA, 21 nt, synthetic construct
  source 1..21: mol_type = other RNA
tcgtcacagtggcttcagtgt

SEQ ID NO: 45 - RNA, 21 nt, synthetic construct
  source 1..21: mol_type = other RNA
gattccttacctcatcccata

SEQ ID NO: 46 - RNA, 21 nt, synthetic construct
  source 1..21: mol_type = other RNA
attccttacctcatcccatat

SEQ ID NO: 47 - RNA, 21 nt, synthetic construct
  source 1..21: mol_type = other RNA
ttccttacctcatcccatatt

SEQ ID NO: 48 - RNA, 21 nt, synthetic construct
  source 1..21: mol_type = other RNA
atcccatattgttccagcaaa

SEQ ID NO: 49 - RNA, 21 nt, synthetic construct
  source 1..21: mol_type = other RNA
tcccatattgttccagcaaat

SEQ ID NO: 50 - RNA, 21 nt, synthetic construct
  source 1..21: mol_type = other RNA
ttgggaaaaactggtatcaaa

SEQ ID NO: 51 - RNA, 21 nt, synthetic construct
  source 1..21: mol_type = other RNA
aaaactggtatcaaaacctca

SEQ ID NO: 52 - RNA, 21 nt, synthetic construct
  source 1..21: mol_type = other RNA
aatactgggttcaccaaaaat

SEQ ID NO: 53 - RNA, 21 nt, synthetic construct
  source 1..21: mol_type = other RNA
ctgggttcaccaaaaatccaa

SEQ ID NO: 54 - RNA, 21 nt, synthetic construct
  source 1..21: mol_type = other RNA
accaaaaatccaagcacaaga

SEQ ID NO: 55 - RNA, 21 nt, synthetic construct
  source 1..21: mol_type = other RNA
gcctgtattggagacagatga

SEQ ID NO: 56 - RNA, 21 nt, synthetic construct
  source 1..21: mol_type = other RNA
tgaagtcgtaagaagtctgat

SEQ ID NO: 57 - RNA, 21 nt, synthetic construct
  source 1..21: mol_type = other RNA
taagaagtctgatagatggaa

SEQ ID NO: 58 - RNA, 21 nt, synthetic construct
  source 1..21: mol_type = other RNA
aagaagtctgatagatggaat

SEQ ID NO: 59 - RNA, 21 nt, synthetic construct
  source 1..21: mol_type = other RNA
agaagtctgatagatggaata

SEQ ID NO: 60 - RNA, 21 nt, synthetic construct
  source 1..21: mol_type = other RNA
aagtctgatagatggaatact

SEQ ID NO: 61 - RNA, 21 nt, synthetic construct
  source 1..21: mol_type = other RNA
agtctgatagatggaatactt

SEQ ID NO: 62 - RNA, 21 nt, synthetic construct
  source 1..21: mol_type = other RNA
gtctgatagatggaatactta

SEQ ID NO: 63 - RNA, 21 nt, synthetic construct
  source 1..21: mol_type = other RNA
agatggaatacttaccaataa

SEQ ID NO: 64 - RNA, 21 nt, synthetic construct
  source 1..21: mol_type = other RNA
tggaatacttaccaataagaa

SEQ ID NO: 65 - RNA, 21 nt, synthetic construct
  source 1..21: mol_type = other RNA
gaatacttaccaataagaaaa

SEQ ID NO: 66 - RNA, 21 nt, synthetic construct
  source 1..21: mol_type = other RNA
aatacttaccaataagaaaat

SEQ ID NO: 67 - RNA, 21 nt, synthetic construct
  source 1..21: mol_type = other RNA
acttaccaataagaaaatgat

SEQ ID NO: 68 - RNA, 21 nt, synthetic construct
  source 1..21: mol_type = other RNA
cttaccaataagaaaatgatt

SEQ ID NO: 69 - RNA, 21 nt, synthetic construct
  source 1..21: mol_type = other RNA
ttaccaataagaaaatgattt

SEQ ID NO: 70 - RNA, 21 nt, synthetic construct
  source 1..21: mol_type = other RNA
taccaataagaaaatgatttt

SEQ ID NO: 71 - RNA, 21 nt, synthetic construct
  source 1..21: mol_type = other RNA
accaataagaaaatgattttt

SEQ ID NO: 72 - RNA, 21 nt, synthetic construct
  source 1..21: mol_type = other RNA
caataagaaaatgatttttgt

SEQ ID NO: 73 - RNA, 21 nt, synthetic construct
  source 1..21: mol_type = other RNA
aataagaaaatgatttttgtt

SEQ ID NO: 74 - RNA, 21 nt, synthetic construct
  source 1..21: mol_type = other RNA
aagaaaatgatttttgttcca

SEQ ID NO: 75 - RNA, 21 nt, synthetic construct
  source 1..21: mol_type = other RNA
agaaaatgatttttgttccat

SEQ ID NO: 76 - RNA, 21 nt, synthetic construct
  source 1..21: mol_type = other RNA
aatgatttttgttccatcgta

SEQ ID NO: 77 - RNA, 21 nt, synthetic construct
  source 1..21: mol_type = other RNA
atgatttttgttccatcgtat

SEQ ID NO: 78 - RNA, 21 nt, synthetic construct
  source 1..21: mol_type = other RNA
ttttgttccatcgtatatcaa

SEQ ID NO: 79 - RNA, 21 nt, synthetic construct
  source 1..21: mol_type = other RNA
tttgttccatcgtatatcaat

SEQ ID NO: 80 - RNA, 21 nt, synthetic construct
  source 1..21: mol_type = other RNA
ttcattcctcagaggagaaaa

SEQ ID NO: 81 - RNA, 21 nt, synthetic construct
  source 1..21: mol_type = other RNA
agaaagaagtgggtgatgtaa

SEQ ID NO: 82 - RNA, 21 nt, synthetic construct
  source 1..21: mol_type = other RNA
caaggatgaagagattaccaa

SEQ ID NO: 83 - RNA, 21 nt, synthetic construct
  source 1..21: mol_type = other RNA
ctaggacatttttggatcaca

SEQ ID NO: 84 - RNA, 21 nt, synthetic construct
  source 1..21: mol_type = other RNA
tggatcacaaaagcacttctt

SEQ ID NO: 85 - RNA, 21 nt, synthetic construct
  source 1..21: mol_type = other RNA
tggagtcgttggtgaagtttt

SEQ ID NO: 86 - RNA, 21 nt, synthetic construct
  source 1..21: mol_type = other RNA
tattggttctgtgggatatta

SEQ ID NO: 87 - RNA, 21 nt, synthetic construct
  source 1..21: mol_type = other RNA
ctaggacatttttggatcaca

SEQ ID NO: 88 - RNA, 21 nt, synthetic construct
  source 1..21: mol_type = other RNA
ttgggaaaaactggtatcaaa

SEQ ID NO: 89 - RNA, 21 nt, synthetic construct
  source 1..21: mol_type = other RNA
ccttacctcatcccatattgt

SEQ ID NO: 90 - RNA, 21 nt, synthetic construct
  source 1..21: mol_type = other RNA
cccatattgttccagcaaatt

SEQ ID NO: 91 - RNA, 21 nt, synthetic construct
  source 1..21: mol_type = other RNA
ccttgggaaaaactggtatca

SEQ ID NO: 92 - RNA, 21 nt, synthetic construct
  source 1..21: mol_type = other RNA
tggtatcaaaacctcatgtct

SEQ ID NO: 93 - RNA, 21 nt, synthetic construct
  source 1..21: mol_type = other RNA
gtatcaaaacctcatgtctct

SEQ ID NO: 94 - RNA, 21 nt, synthetic construct
  source 1..21: mol_type = other RNA
ttgtgaatactgggttcacca

SEQ ID NO: 95 - RNA, 21 nt, synthetic construct
  source 1..21: mol_type = other RNA
tgtgaatactgggttcaccaa

SEQ ID NO: 96 - RNA, 21 nt, synthetic construct
  source 1..21: mol_type = other RNA
gtgaatactgggttcaccaaa

SEQ ID NO: 97 - RNA, 21 nt, synthetic construct
  source 1..21: mol_type = other RNA
tgaatactgggttcaccaaaa

SEQ ID NO: 98 - RNA, 21 nt, synthetic construct
  source 1..21: mol_type = other RNA
ccaaaaatccaagcacaagat

SEQ ID NO: 99 - RNA, 21 nt, synthetic construct
  source 1..21: mol_type = other RNA
ggaatacttaccaataagaaa

SEQ ID NO: 100 - RNA, 21 nt, synthetic construct
  source 1..21: mol_type = other RNA
taggacatttttggatcacaa

SEQ ID NO: 101 - RNA, 23 nt, synthetic construct
  source 1..23: mol_type = other RNA
tccaagtaggagtagatgatgtt

SEQ ID NO: 102 - RNA, 23 nt, synthetic construct
  source 1..23: mol_type = other RNA
aacgactccaagtaggagtagtt

SEQ ID NO: 103 - RNA, 23 nt, synthetic construct
  source 1..23: mol_type = other RNA
tcaccaacgactccaagtaggtt

SEQ ID NO: 104 - RNA, 23 nt, synthetic construct
  source 1..23: mol_type = other RNA
ttcaccaacgactccaagtagtt

SEQ ID NO: 105 - RNA, 23 nt, synthetic construct
  source 1..23: mol_type = other RNA
aacttcaccaacgactccaagtt

SEQ ID NO: 106 - RNA, 23 nt, synthetic construct
  source 1..23: mol_type = other RNA
aaaacttcaccaacgactccatt

SEQ ID NO: 107 - RNA, 23 nt, synthetic construct
  source 1..23: mol_type = other RNA
aggaatgaaaaacttcaccaatt

SEQ ID NO: 108 - RNA, 23 nt, synthetic construct
  source 1..23: mol_type = other RNA
tgaggaatgaaaaacttcacctt

SEQ ID NO: 109 - RNA, 23 nt, synthetic construct
  source 1..23: mol_type = other RNA
agtagtctgcctgcctattcctt

SEQ ID NO: 110 - RNA, 23 nt, synthetic construct
  source 1..23: mol_type = other RNA
aagtagtctgcctgcctattctt

SEQ ID NO: 111 - RNA, 23 nt, synthetic construct
  source 1..23: mol_type = other RNA
taagtagtctgcctgcctatttt

SEQ ID NO: 112 - RNA, 23 nt, synthetic construct
  source 1..23: mol_type = other RNA
ataagtagtctgcctgcctattt

SEQ ID NO: 113 - RNA, 23 nt, synthetic construct
  source 1..23: mol_type = other RNA
tcataagtagtctgcctgccttt

SEQ ID NO: 114 - RNA, 23 nt, synthetic construct
  source 1..23: mol_type = other RNA
ttcataagtagtctgcctgcctt

SEQ ID NO: 115 - RNA, 23 nt, synthetic construct
  source 1..23: mol_type = other RNA
taatatcccacagaaccaatatt

SEQ ID NO: 116 - RNA, 23 nt, synthetic construct
  source 1..23: mol_type = other RNA
attaatatcccacagaaccaatt

SEQ ID NO: 117 - RNA, 23 nt, synthetic construct
  source 1..23: mol_type = other RNA
ttattaatatcccacagaacctt

SEQ ID NO: 118 - RNA, 23 nt, synthetic construct
  source 1..23: mol_type = other RNA
tgttgctgcagtctaccacattt

SEQ ID NO: 119 - RNA, 23 nt, synthetic construct
  source 1..23: mol_type = other RNA
atctcttctctgttgctgcagtt

SEQ ID NO: 120 - RNA, 23 nt, synthetic construct
  source 1..23: mol_type = other RNA
acttctttcttcacctgattttt

SEQ ID NO: 121 - RNA, 23 nt, synthetic construct
  source 1..23: mol_type = other RNA
acatcacccacttctttcttctt

SEQ ID NO: 122 - RNA, 23 nt, synthetic construct
  source 1..23: mol_type = other RNA
tggtaatctcttcatccttggtt

SEQ ID NO: 123 - RNA, 23 nt, synthetic construct
  source 1..23: mol_type = other RNA
aaatgtcttggtaatctcttctt

SEQ ID NO: 124 - RNA, 23 nt, synthetic construct
  source 1..23: mol_type = other RNA
tcaaatgtcttggtaatctcttt

SEQ ID NO: 125 - RNA, 23 nt, synthetic construct
  source 1..23: mol_type = other RNA
acctcaaatgtcttggtaatctt

SEQ ID NO: 126 - RNA, 23 nt, synthetic construct
  source 1..23: mol_type = other RNA
ttgacctcaaatgtcttggtatt

SEQ ID NO: 127 - RNA, 23 nt, synthetic construct
  source 1..23: mol_type = other RNA
tgttgacctcaaatgtcttggtt

SEQ ID NO: 128 - RNA, 23 nt, synthetic construct
  source 1..23: mol_type = other RNA
tgtcctaggatgttgacctcatt

SEQ ID NO: 129 - RNA, 23 nt, synthetic construct
  source 1..23: mol_type = other RNA
aatgtcctaggatgttgaccttt

SEQ ID NO: 130 - RNA, 23 nt, synthetic construct
  source 1..23: mol_type = other RNA
aaaatgtcctaggatgttgactt

SEQ ID NO: 131 - RNA, 23 nt, synthetic construct
  source 1..23: mol_type = other RNA
aaaaatgtcctaggatgttgatt

SEQ ID NO: 132 - RNA, 23 nt, synthetic construct
  source 1..23: mol_type = other RNA
atccaaaaatgtcctaggatgtt

SEQ ID NO: 133 - RNA, 23 nt, synthetic construct
  source 1..23: mol_type = other RNA
tgatccaaaaatgtcctaggatt

SEQ ID NO: 134 - RNA, 23 nt, synthetic construct
  source 1..23: mol_type = other RNA
tttgtgatccaaaaatgtccttt

SEQ ID NO: 135 - RNA, 23 nt, synthetic construct
  source 1..23: mol_type = other RNA
ttttgtgatccaaaaatgtcctt

SEQ ID NO: 136 - RNA, 23 nt, synthetic construct
  source 1..23: mol_type = other RNA
agtgcttttgtgatccaaaaatt

SEQ ID NO: 137 - RNA, 23 nt, synthetic construct
  source 1..23: mol_type = other RNA
agaagtgcttttgtgatccaatt

SEQ ID NO: 138 - RNA, 23 nt, synthetic construct
  source 1..23: mol_type = other RNA
tggaagaagtgcttttgtgattt

SEQ ID NO: 139 - RNA, 23 nt, synthetic construct
  source 1..23: mol_type = other RNA
atggaagaagtgcttttgtgatt

SEQ ID NO: 140 - RNA, 23 nt, synthetic construct
  source 1..23: mol_type = other RNA
tcatcgatggaagaagtgctttt

SEQ ID NO: 141 - RNA, 23 nt, synthetic construct
  source 1..23: mol_type = other RNA
atcatcgatggaagaagtgcttt

SEQ ID NO: 142 - RNA, 23 nt, synthetic construct
  source 1..23: mol_type = other RNA
ttctctccatcatcgatggaatt

SEQ ID NO: 143 - RNA, 23 nt, synthetic construct
  source 1..23: mol_type = other RNA
actgaagccactgtgacgatgtt

SEQ ID NO: 144 - RNA, 23 nt, synthetic construct
  source 1..23: mol_type = other RNA
acactgaagccactgtgacgatt

SEQ ID NO: 145 - RNA, 23 nt, synthetic construct
  source 1..23: mol_type = other RNA
tatgggatgaggtaaggaatctt

SEQ ID NO: 146 - RNA, 23 nt, synthetic construct
  source 1..23: mol_type = other RNA
atatgggatgaggtaaggaattt

SEQ ID NO: 147 - RNA, 23 nt, synthetic construct
  source 1..23: mol_type = other RNA
aatatgggatgaggtaaggaatt

SEQ ID NO: 148 - RNA, 23 nt, synthetic construct
  source 1..23: mol_type = other RNA
tttgctggaacaatatgggattt

SEQ ID NO: 149 - RNA, 23 nt, synthetic construct
  source 1..23: mol_type = other RNA
atttgctggaacaatatgggatt

SEQ ID NO: 150 - RNA, 23 nt, synthetic construct
  source 1..23: mol_type = other RNA
tttgataccagtttttcccaatt

SEQ ID NO: 151 - RNA, 23 nt, synthetic construct
  source 1..23: mol_type = other RNA
tgaggttttgataccagtttttt

SEQ ID NO: 152 - RNA, 23 nt, synthetic construct
  source 1..23: mol_type = other RNA
atttttggtgaacccagtatttt

SEQ ID NO: 153 - RNA, 23 nt, synthetic construct
  source 1..23: mol_type = other RNA
ttggatttttggtgaacccagtt

SEQ ID NO: 154 - RNA, 23 nt, synthetic construct
  source 1..23: mol_type = other RNA
tcttgtgcttggatttttggttt

SEQ ID NO: 155 - RNA, 23 nt, synthetic construct
  source 1..23: mol_type = other RNA
tcatctgtctccaatacaggctt

SEQ ID NO: 156 - RNA, 23 nt, synthetic construct
  source 1..23: mol_type = other RNA
atcagacttcttacgacttcatt

SEQ ID NO: 157 - RNA, 23 nt, synthetic construct
  source 1..23: mol_type = other RNA
ttccatctatcagacttcttatt

SEQ ID NO: 158 - RNA, 23 nt, synthetic construct
  source 1..23: mol_type = other RNA
attccatctatcagacttctttt

SEQ ID NO: 159 - RNA, 23 nt, synthetic construct
  source 1..23: mol_type = other RNA
tattccatctatcagacttcttt

SEQ ID NO: 160 - RNA, 23 nt, synthetic construct
  source 1..23: mol_type = other RNA
agtattccatctatcagactttt

SEQ ID NO: 161 - RNA, 23 nt, synthetic construct
  source 1..23: mol_type = other RNA
aagtattccatctatcagacttt

SEQ ID NO: 162 - RNA, 23 nt, synthetic construct
  source 1..23: mol_type = other RNA
taagtattccatctatcagactt

SEQ ID NO: 163 - RNA, 23 nt, synthetic construct
  source 1..23: mol_type = other RNA
ttattggtaagtattccatcttt

SEQ ID NO: 164 - RNA, 23 nt, synthetic construct
  source 1..23: mol_type = other RNA
ttcttattggtaagtattccatt

SEQ ID NO: 165 - RNA, 23 nt, synthetic construct
  source 1..23: mol_type = other RNA
ttttcttattggtaagtattctt

SEQ ID NO: 166 - RNA, 23 nt, synthetic construct
  source 1..23: mol_type = other RNA
attttcttattggtaagtatttt

SEQ ID NO: 167 - RNA, 23 nt, synthetic construct
  source 1..23: mol_type = other RNA
atcattttcttattggtaagttt

SEQ ID NO: 168 - RNA, 23 nt, synthetic construct
  source 1..23: mol_type = other RNA
aatcattttcttattggtaagtt

SEQ ID NO: 169 - RNA, 23 nt, synthetic construct
  source 1..23: mol_type = other RNA
aaatcattttcttattggtaatt

SEQ ID NO: 170 - RNA, 23 nt, synthetic construct
  source 1..23: mol_type = other RNA
aaaatcattttcttattggtatt

SEQ ID NO: 171 - RNA, 23 nt, synthetic construct
  source 1..23: mol_type = other RNA
aaaaatcattttcttattggttt

SEQ ID NO: 172 - RNA, 23 nt, synthetic construct
  source 1..23: mol_type = other RNA
acaaaaatcattttcttattgtt

SEQ ID NO: 173 - RNA, 23 nt, synthetic construct
  source 1..23: mol_type = other RNA
aacaaaaatcattttcttatttt

SEQ ID NO: 174 - RNA, 23 nt, synthetic construct
  source 1..23: mol_type = other RNA
tggaacaaaaatcattttctttt

SEQ ID NO: 175 - RNA, 23 nt, synthetic construct
  source 1..23: mol_type = other RNA
atggaacaaaaatcattttcttt

SEQ ID NO: 176 - RNA, 23 nt, synthetic construct
  source 1..23: mol_type = other RNA
tacgatggaacaaaaatcatttt

SEQ ID NO: 177 - RNA, 23 nt, synthetic construct
  source 1..23: mol_type = other RNA
atacgatggaacaaaaatcattt

SEQ ID NO: 178 - RNA, 23 nt, synthetic construct
  source 1..23: mol_type = other RNA
ttgatatacgatggaacaaaatt

SEQ ID NO: 179 - RNA, 23 nt, synthetic construct
  source 1..23: mol_type = other RNA
attgatatacgatggaacaaatt

SEQ ID NO: 180 - RNA, 23 nt, synthetic construct
  source 1..23: mol_type = other RNA
ttttctcctctgaggaatgaatt

SEQ ID NO: 181 - RNA, 23 nt, synthetic construct
  source 1..23: mol_type = other RNA
ttacatcacccacttctttcttt

SEQ ID NO: 182 - RNA, 23 nt, synthetic construct
  source 1..23: mol_type = other RNA
ttggtaatctcttcatccttgtt

SEQ ID NO: 183 - RNA, 23 nt, synthetic construct
  source 1..23: mol_type = other RNA
tgtgatccaaaaatgtcctagtt

SEQ ID NO: 184 - RNA, 23 nt, synthetic construct
  source 1..23: mol_type = other RNA
aagaagtgcttttgtgatccatt

SEQ ID NO: 185 - RNA, 23 nt, synthetic construct
  source 1..23: mol_type = other RNA
aaaacttcaccaacgactccatt

SEQ ID NO: 186 - RNA, 23 nt, synthetic construct
  source 1..23: mol_type = other RNA
taatatcccacagaaccaatatt

SEQ ID NO: 187 - RNA, 23 nt, synthetic construct
  source 1..23: mol_type = other RNA
tgtgatccaaaaatgtcctagtt

SEQ ID NO: 188 - RNA, 23 nt, synthetic construct
  source 1..23: mol_type = other RNA
tttgataccagtttttcccaatt

SEQ ID NO: 189 - RNA, 23 nt, synthetic construct
  source 1..23: mol_type = other RNA
acaatatgggatgaggtaaggtt

SEQ ID NO: 190 - RNA, 23 nt, synthetic construct
  source 1..23: mol_type = other RNA
aatttgctggaacaatatgggtt

SEQ ID NO: 191 - RNA, 23 nt, synthetic construct
  source 1..23: mol_type = other RNA
tgataccagtttttcccaaggtt

SEQ ID NO: 192 - RNA, 23 nt, synthetic construct
  source 1..23: mol_type = other RNA
agacatgaggttttgataccatt

SEQ ID NO: 193 - RNA, 23 nt, synthetic construct
  source 1..23: mol_type = other RNA
agagacatgaggttttgatactt

SEQ ID NO: 194 - RNA, 23 nt, synthetic construct
  source 1..23: mol_type = other RNA
tggtgaacccagtattcacaatt

SEQ ID NO: 195 - RNA, 23 nt, synthetic construct
  source 1..23: mol_type = other RNA
ttggtgaacccagtattcacatt

SEQ ID NO: 196 - RNA, 23 nt, synthetic construct
  source 1..23: mol_type = other RNA
tttggtgaacccagtattcactt

SEQ ID NO: 197 - RNA, 23 nt, synthetic construct
  source 1..23: mol_type = other RNA
ttttggtgaacccagtattcatt

SEQ ID NO: 198 - RNA, 23 nt, synthetic construct
  source 1..23: mol_type = other RNA
atcttgtgcttggatttttggtt

SEQ ID NO: 199 - RNA, 23 nt, synthetic construct
  source 1..23: mol_type = other RNA
tttcttattggtaagtattcctt

SEQ ID NO: 200 - RNA, 23 nt, synthetic construct
  source 1..23: mol_type = other RNA
ttgtgatccaaaaatgtcctatt

SEQ ID NO: 201 - RNA, 21 nt, synthetic construct
  source 1..21: mol_type = other RNA
cttggagtcgttggtgaagtt

SEQ ID NO: 202 - RNA, 21 nt, synthetic construct
  source 1..21: mol_type = other RNA
tggagtcgttggtgaagtttt

SEQ ID NO: 203 - RNA, 21 nt, synthetic construct
  source 1..21: mol_type = other RNA
ttggtgaagtttttcattcct

SEQ ID NO: 204 - RNA, 21 nt, synthetic construct
  source 1..21: mol_type = other RNA
ggtgaagtttttcattcctca

SEQ ID NO: 205 - RNA, 21 nt, synthetic construct
  source 1..21: mol_type = other RNA
ggcaggcagactacttatgaa

SEQ ID NO: 206 - RNA, 21 nt, synthetic construct
  source 1..21: mol_type = other RNA
tattggttctgtgggatatta

SEQ ID NO: 207 - RNA, 21 nt, synthetic construct
  source 1..21: mol_type = other RNA
ggttctgtgggatattaataa

SEQ ID NO: 208 - RNA, 21 nt, synthetic construct
  source 1..21: mol_type = other RNA
ccaaggatgaagagattacca

SEQ ID NO: 209 - RNA, 21 nt, synthetic construct
  source 1..21: mol_type = other RNA
gaagagattaccaagacattt

SEQ ID NO: 210 - RNA, 21 nt, synthetic construct
  source 1..21: mol_type = other RNA
agagattaccaagacatttga

SEQ ID NO: 211 - RNA, 21 nt, synthetic construct
  source 1..21: mol_type = other RNA
gattaccaagacatttgaggt

SEQ ID NO: 212 - RNA, 21 nt, synthetic construct
  source 1..21: mol_type = other RNA
taccaagacatttgaggtcaa

SEQ ID NO: 213 - RNA, 21 nt, synthetic construct
  source 1..21: mol_type = other RNA
tcctaggacatttttggatca

SEQ ID NO: 214 - RNA, 21 nt, synthetic construct
  source 1..21: mol_type = other RNA
ctaggacatttttggatcaca

SEQ ID NO: 215 - RNA, 21 nt, synthetic construct
  source 1..21: mol_type = other RNA
tttttggatcacaaaagcact

SEQ ID NO: 216 - RNA, 21 nt, synthetic construct
  source 1..21: mol_type = other RNA
tggatcacaaaagcacttctt

SEQ ID NO: 217 - RNA, 21 nt, synthetic construct
  source 1..21: mol_type = other RNA
ttgggaaaaactggtatcaaa

SEQ ID NO: 218 - RNA, 21 nt, synthetic construct
  source 1..21: mol_type = other RNA
aaaactggtatcaaaacctca

SEQ ID NO: 219 - RNA, 21 nt, synthetic construct
  source 1..21: mol_type = other RNA
tgaagtcgtaagaagtctgat

SEQ ID NO: 220 - RNA, 21 nt, synthetic construct
  source 1..21: mol_type = other RNA
agtctgatagatggaatactt

SEQ ID NO: 221 - RNA, 21 nt, synthetic construct
  source 1..21: mol_type = other RNA
gtctgatagatggaatactta

SEQ ID NO: 222 - RNA, 21 nt, synthetic construct
  source 1..21: mol_type = other RNA
agatggaatacttaccaataa

SEQ ID NO: 223 - RNA, 21 nt, synthetic construct
  source 1..21: mol_type = other RNA
tggaatacttaccaataagaa

SEQ ID NO: 224 - RNA, 21 nt, synthetic construct
  source 1..21: mol_type = other RNA
acttaccaataagaaaatgat

SEQ ID NO: 225 - RNA, 21 nt, synthetic construct
  source 1..21: mol_type = other RNA
cttaccaataagaaaatgatt

SEQ ID NO: 226 - RNA, 21 nt, synthetic construct
  source 1..21: mol_type = other RNA
accaataagaaaatgattttt

SEQ ID NO: 227 - RNA, 21 nt, synthetic construct
  source 1..21: mol_type = other RNA
aagaaaatgatttttgttcca

SEQ ID NO: 228 - RNA, 21 nt, synthetic construct
  source 1..21: mol_type = other RNA
aatgatttttgttccatcgta

SEQ ID NO: 229 - RNA, 21 nt, synthetic construct
  source 1..21: mol_type = other RNA
atgatttttgttccatcgtat

SEQ ID NO: 230 - RNA, 21 nt, synthetic construct
  source 1..21: mol_type = other RNA
ttttgttccatcgtatatcaa

SEQ ID NO: 231 - RNA, 23 nt, synthetic construct
  source 1..23: mol_type = other RNA
aacttcaccaacgactccaagtt

SEQ ID NO: 232 - RNA, 23 nt, synthetic construct
  source 1..23: mol_type = other RNA
aaaacttcaccaacgactccatt

SEQ ID NO: 233 - RNA, 23 nt, synthetic construct
  source 1..23: mol_type = other RNA
aggaatgaaaaacttcaccaatt

SEQ ID NO: 234 - RNA, 23 nt, synthetic construct
  source 1..23: mol_type = other RNA
tgaggaatgaaaaacttcacctt

SEQ ID NO: 235 - RNA, 23 nt, synthetic construct
  source 1..23: mol_type = other RNA
ttcataagtagtctgcctgcctt

SEQ ID NO: 236 - RNA, 23 nt, synthetic construct
  source 1..23: mol_type = other RNA
taatatcccacagaaccaatatt

SEQ ID NO: 237 - RNA, 23 nt, synthetic construct
  source 1..23: mol_type = other RNA
ttattaatatcccacagaacctt

SEQ ID NO: 238 - RNA, 23 nt, synthetic construct
  source 1..23: mol_type = other RNA
tggtaatctcttcatccttggtt

SEQ ID NO: 239 - RNA, 23 nt, synthetic construct
  source 1..23: mol_type = other RNA
aaatgtcttggtaatctcttctt

SEQ ID NO: 240 - RNA, 23 nt, synthetic construct
  source 1..23: mol_type = other RNA
tcaaatgtcttggtaatctcttt

SEQ ID NO: 241 - RNA, 23 nt, synthetic construct
  source 1..23: mol_type = other RNA
acctcaaatgtcttggtaatctt

SEQ ID NO: 242 - RNA, 23 nt, synthetic construct
  source 1..23: mol_type = other RNA
ttgacctcaaatgtcttggtatt

SEQ ID NO: 243 - RNA, 23 nt, synthetic construct
  source 1..23: mol_type = other RNA
tgatccaaaaatgtcctaggatt

SEQ ID NO: 244 - RNA, 23 nt, synthetic construct
  source 1..23: mol_type = other RNA
tgtgatccaaaaatgtcctagtt

SEQ ID NO: 245 - RNA, 23 nt, synthetic construct
  source 1..23: mol_type = other RNA
agtgcttttgtgatccaaaaatt

SEQ ID NO: 246 - RNA, 23 nt, synthetic construct
  source 1..23: mol_type = other RNA
aagaagtgcttttgtgatccatt

SEQ ID NO: 247 - RNA, 23 nt, synthetic construct
  source 1..23: mol_type = other RNA
tttgataccagtttttcccaatt

SEQ ID NO: 248 - RNA, 23 nt, synthetic construct
  source 1..23: mol_type = other RNA
tgaggttttgataccagtttttt

SEQ ID NO: 249 - RNA, 23 nt, synthetic construct
  source 1..23: mol_type = other RNA
atcagacttcttacgacttcatt

SEQ ID NO: 250 - RNA, 23 nt, synthetic construct
  source 1..23: mol_type = other RNA
aagtattccatctatcagacttt

SEQ ID NO: 251 - RNA, 23 nt, synthetic construct
  source 1..23: mol_type = other RNA
taagtattccatctatcagactt

SEQ ID NO: 252 - RNA, 23 nt, synthetic construct
  source 1..23: mol_type = other RNA
ttattggtaagtattccatcttt

SEQ ID NO: 253 - RNA, 23 nt, synthetic construct
  source 1..23: mol_type = other RNA
ttcttattggtaagtattccatt

SEQ ID NO: 254 - RNA, 23 nt, synthetic construct
  source 1..23: mol_type = other RNA
atcattttcttattggtaagttt

SEQ ID NO: 255 - RNA, 23 nt, synthetic construct
  source 1..23: mol_type = other RNA
aatcattttcttattggtaagtt

SEQ ID NO: 256 - RNA, 23 nt, synthetic construct
  source 1..23: mol_type = other RNA
aaaaatcattttcttattggttt

SEQ ID NO: 257 - RNA, 23 nt, synthetic construct
  source 1..23: mol_type = other RNA
tggaacaaaaatcattttctttt

SEQ ID NO: 258 - RNA, 23 nt, synthetic construct
  source 1..23: mol_type = other RNA
tacgatggaacaaaaatcatttt

SEQ ID NO: 259 - RNA, 23 nt, synthetic construct
  source 1..23: mol_type = other RNA
atacgatggaacaaaaatcattt

SEQ ID NO: 260 - RNA, 23 nt, synthetic construct
  source 1..23: mol_type = other RNA
ttgatatacgatggaacaaaatt

SEQ ID NO: 261 - DNA, 903 bp, Homo sapiens
  source 1..903: mol_type = genomic DNA
atgaacatcatcctagaaatccttctgcttctgatcaccatcatctactcctacttggagtcgttggtgaagtttttcattcctcagaggagaaaatctgtggctggggagattgttctcattactggagctgggcatggaataggcaggcagactacttatgaatttgcaaaacgacagagcatattggttctgtgggatattaataagcgcggtgtggaggaaactgcagctgagtgccgaaaactaggcgtcactgcgcatgcgtatgtggtagactgcagcaacagagaagagatctatcgctctctaaatcaggtgaagaaagaagtgggtgatgtaacaatcgtggtgaataatgctgggacagtatatccagccgatcttctcagcaccaaggatgaagagattaccaagacatttgaggtcaacatcctaggacatttttggatcacaaaagcacttcttccatcgatgatggagagaaatcatggccacatcgtcacagtggcttcagtgtgcggccacgaagggattccttacctcatcccatattgttccagcaaatttgccgctgttggctttcacagaggtctgacatcagaacttcaggccttgggaaaaactggtatcaaaacctcatgtctctgcccagtttttgtgaatactgggttcaccaaaaatccaagcacaagattatggcctgtattggagacagatgaagtcgtaagaagtctgatagatggaatacttaccaataagaaaatgatttttgttccatcgtatatcaatatctttctgagactacagaagtttcttcctgaacgcgcctcagcgattttaaatcgtatgcagaatattcaatttgaagcagtggttggccacaaaatcaaaatgaaatga

SEQ ID NO: 262 - RNA, 21 nt, synthetic construct
  source 1..21: mol_type = other RNA
cttggagtcgttggtgaagtt

SEQ ID NO: 263 - RNA, 19 nt, synthetic construct
  source 1..19: mol_type = other RNA
tggagtcgttggtgaagtt

SEQ ID NO: 264 - RNA, 19 nt, synthetic construct
  source 1..19: mol_type = other RNA
tggagtcgttggtgaagtt

SEQ ID NO: 265 - RNA, 21 nt, synthetic construct
  source 1..21: mol_type = other RNA
cttggagtcgttggtgaagtt

SEQ ID NO: 266 - RNA, 21 nt, synthetic construct
  source 1..21: mol_type = other RNA
cttggagtcgttggtgaagtt

SEQ ID NO: 267 - RNA, 21 nt, synthetic construct
  source 1..21: mol_type = other RNA
tggagtcgttggtgaagtttt

SEQ ID NO: 268 - RNA, 19 nt, synthetic construct
  source 1..19: mol_type = other RNA
ggtgaagtttttcattcct

SEQ ID NO: 269 - RNA, 19 nt, synthetic construct
  source 1..19: mol_type = other RNA
ggtgaagtttttcattcct

SEQ ID NO: 270 - RNA, 21 nt, synthetic construct
  source 1..21: mol_type = other RNA
ttggtgaagtttttcattcct

SEQ ID NO: 271 - RNA, 21 nt, synthetic construct
  source 1..21: mol_type = other RNA
ttggtgaagtttttcattcct

SEQ ID NO: 272 - RNA, 21 nt, synthetic construct
  source 1..21: mol_type = other RNA
tattggttctgtgggatatta

SEQ ID NO: 273 - RNA, 21 nt, synthetic construct
  source 1..21: mol_type = other RNA
tattggttctgtgggatatta

SEQ ID NO: 274 - RNA, 21 nt, synthetic construct
  source 1..21: mol_type = other RNA
tattggttctgtgggatatta

SEQ ID NO: 275 - RNA, 21 nt, synthetic construct
  source 1..21: mol_type = other RNA
ttgggaaaaactggtatcaaa

SEQ ID NO: 276 - RNA, 21 nt, synthetic construct
  source 1..21: mol_type = other RNA
ttgggaaaaactggtatcaaa

SEQ ID NO: 277 - RNA, 21 nt, synthetic construct
  source 1..21: mol_type = other RNA
ttgggaaaaactggtatcaaa

SEQ ID NO: 278 - RNA, 21 nt, synthetic construct
  source 1..21: mol_type = other RNA
accaataagaaaatgattttt

SEQ ID NO: 279 - RNA, 21 nt, synthetic construct
  source 1..21: mol_type = other RNA
accaataagaaaatgattttt

SEQ ID NO: 280 - RNA, 21 nt, synthetic construct
  source 1..21: mol_type = other RNA
accaataagaaaatgattttt

SEQ ID NO: 281 - RNA, 21 nt, synthetic construct
  source 1..21: mol_type = other RNA
tggtatcaaaacctcatgtct

SEQ ID NO: 282 - RNA, 21 nt, synthetic construct
  source 1..21: mol_type = other RNA
tggtatcaaaacctcatgtct

SEQ ID NO: 283 - RNA, 21 nt, synthetic construct
  source 1..21: mol_type = other RNA
gtatcaaaacctcatgtctct

SEQ ID NO: 284 - RNA, 21 nt, synthetic construct
  source 1..21: mol_type = other RNA
gtatcaaaacctcatgtctct

SEQ ID NO: 285 - RNA, 21 nt, synthetic construct
  source 1..21: mol_type = other RNA
gtatcaaaacctcatgtctct

SEQ ID NO: 286 - RNA, 21 nt, synthetic construct
  source 1..21: mol_type = other RNA
gtatcaaaacctcatgtctct

SEQ ID NO: 287 - RNA, 21 nt, synthetic construct
  source 1..21: mol_type = other RNA
tgaagtcgtaagaagtctgat

SEQ ID NO: 288 - RNA, 23 nt, synthetic construct
  source 1..23: mol_type = other RNA
aacttcaccaacgactccaagtt

SEQ ID NO: 289 - RNA, 21 nt, synthetic construct
  source 1..21: mol_type = other RNA
aacttcaccaacgactccaag

SEQ ID NO: 290 - RNA, 21 nt, synthetic construct
  source 1..21: mol_type = other RNA
aacttcaccaacgactccaag

SEQ ID NO: 291 - RNA, 23 nt, synthetic construct
  source 1..23: mol_type = other RNA
aacttcaccaacgactccaagta

SEQ ID NO: 292 - RNA, 23 nt, synthetic construct
  source 1..23: mol_type = other RNA
aacttcaccaacgactccaagta

SEQ ID NO: 293 - RNA, 23 nt, synthetic construct
  source 1..23: mol_type = other RNA
aaaacttcaccaacgactccatt

SEQ ID NO: 294 - RNA, 21 nt, synthetic construct
  source 1..21: mol_type = other RNA
aggaatgaaaaacttcaccaa

SEQ ID NO: 295 - RNA, 21 nt, synthetic construct
  source 1..21: mol_type = other RNA
aggaatgaaaaacttcaccaa

SEQ ID NO: 296 - RNA, 23 nt, synthetic construct
  source 1..23: mol_type = other RNA
aggaatgaaaaacttcaccaacg

SEQ ID NO: 297 - RNA, 23 nt, synthetic construct
  source 1..23: mol_type = other RNA
aggaatgaaaaacttcaccaacg

SEQ ID NO: 298 - RNA, 23 nt, synthetic construct
  source 1..23: mol_type = other RNA
taatatcccacagaaccaatatg

SEQ ID NO: 299 - RNA, 23 nt, synthetic construct
  source 1..23: mol_type = other RNA
taatatcccacagaaccaatatg

SEQ ID NO: 300 - RNA, 23 nt, synthetic construct
  source 1..23: mol_type = other RNA
aaatatcccacagaaccaatatg

SEQ ID NO: 301 - RNA, 23 nt, synthetic construct
  source 1..23: mol_type = other RNA
tttgataccagtttttcccaagg

SEQ ID NO: 302 - RNA, 23 nt, synthetic construct
  source 1..23: mol_type = other RNA
tttgataccagtttttcccaagg

SEQ ID NO: 303 - RNA, 23 nt, synthetic construct
  source 1..23: mol_type = other RNA
attgataccagtttttcccaagg

SEQ ID NO: 304 - RNA, 23 nt, synthetic construct
  source 1..23: mol_type = other RNA
aaaaatcattttcttattggtaa

SEQ ID NO: 305 - RNA, 23 nt, synthetic construct
  source 1..23: mol_type = other RNA
aaaaatcattttcttattggtaa

SEQ ID NO: 306 - RNA, 23 nt, synthetic construct
  source 1..23: mol_type = other RNA
taaaatcattttcttattggtaa

SEQ ID NO: 307 - RNA, 23 nt, synthetic construct
  source 1..23: mol_type = other RNA
agacatgaggttttgataccatt

SEQ ID NO: 308 - RNA, 23 nt, synthetic construct
  source 1..23: mol_type = other RNA
agacatgaggttttgataccagt

SEQ ID NO: 309 - RNA, 23 nt, synthetic construct
  source 1..23: mol_type = other RNA
agagacatgaggttttgatactt

SEQ ID NO: 310 - RNA, 23 nt, synthetic construct
  source 1..23: mol_type = other RNA
agagacatgaggttttgatacca

SEQ ID NO: 311 - RNA, 23 nt, synthetic construct
  source 1..23: mol_type = other RNA
agagacatgaggttttgatacca

SEQ ID NO: 312 - RNA, 23 nt, synthetic construct
  source 1..23: mol_type = other RNA
tgagacatgaggttttgatacca

SEQ ID NO: 313 - RNA, 23 nt, synthetic construct
  source 1..23: mol_type = other RNA
atcagacttcttacgacttcatt

SEQ ID NO: 314 - RNA, 21 nt, synthetic construct
  source 1..21: mol_type = other RNA
ttggtgaagtttttcattcct

SEQ ID NO: 315 - RNA, 21 nt, synthetic construct
  source 1..21: mol_type = other RNA
accaataagaaaatgattttt

SEQ ID NO: 316 - RNA, 21 nt, synthetic construct
  source 1..21: mol_type = other RNA
  modified_base 1: mod_base = OTHER; note = 2'O-methyl cytidine phosphorothioate
  modified_base 2: mod_base = OTHER; note = 2'O-methyl adenosine phosphorothioate
  modified_base 3: mod_base = OTHER; note = 2'O-methyl uridine
  modified_base 4: mod_base = OTHER; note = 2'O-methyl cytidine
  modified_base 5: mod_base = OTHER; note = 2'O-methyl adenosine
  modified_base 6: mod_base = OTHER; note = 2'O-methyl uridine
  modified_base 7: mod_base = OTHER; note = 2'-fluoro cytidine
  modified_base 8: mod_base = OTHER; note = 2'O-methyl uridine
  modified_base 9: mod_base = OTHER; note = 2'-fluoro adenosine
  modified_base 10: mod_base = OTHER; note = 2'-fluoro cytidine
  modified_base 11: mod_base = OTHER; note = 2'-fluoro uridine
  modified_base 12: mod_base = OTHER; note = 2'O-methyl cytidine
  modified_base 13: mod_base = OTHER; note = 2'O-methyl cytidine
  modified_base 14: mod_base = OTHER; note = 2'O-methyl uridine
  modified_base 15: mod_base = OTHER; note = 2'O-methyl adenosine
  modified_base 16: mod_base = OTHER; note = 2'O-methyl cytidine
  modified_base 17: mod_base = OTHER; note = 2'O-methyl uridine
  modified_base 18: mod_base = OTHER; note = 2'O-methyl uridine
  modified_base 19: mod_base = OTHER; note = 2'O-methyl guanosine
  modified_base 20: mod_base = OTHER; note = 2'O-methyl guanosine phosphorothioate
  modified_base 21: mod_base = OTHER; note = 2'O-methyl adenosine
catcatctactcctacttgga

SEQ ID NO: 317 - RNA, 21 nt, synthetic construct
  source 1..21: mol_type = other RNA
  modified_base 1: mod_base = OTHER; note = 2'O-methyl cytidine phosphorothioate
  modified_base 2: mod_base = OTHER; note = 2'O-methyl uridine phosphorothioate
  modified_base 3: mod_base = OTHER; note = 2'O-methyl adenosine
  modified_base 4: mod_base = OTHER; note = 2'O-methyl cytidine
  modified_base 5: mod_base = OTHER; note = 2'O-methyl uridine
  modified_base 6: mod_base = OTHER; note = 2'O-methyl cytidine
  modified_base 7: mod_base = OTHER; note = 2'-fluoro cytidine
  modified_base 8: mod_base = OTHER; note = 2'O-methyl uridine
  modified_base 9: mod_base = OTHER; note = 2'-fluoro adenosine
  modified_base 10: mod_base = OTHER; note = 2'-fluoro cytidine
  modified_base 11: mod_base = OTHER; note = 2'-fluoro uridine
  modified_base 12: mod_base = OTHER; note = 2'O-methyl uridine
  modified_base 13: mod_base = OTHER; note = 2'O-methyl guanosine
  modified_base 14: mod_base = OTHER; note = 2'O-methyl guanosine
  modified_base 15: mod_base = OTHER; note = 2'O-methyl adenosine
  modified_base 16: mod_base = OTHER; note = 2'O-methyl guanosine
  modified_base 17: mod_base = OTHER; note = 2'O-methyl uridine
  modified_base 18: mod_base = OTHER; note = 2'O-methyl cytidine
  modified_base 19: mod_base = OTHER; note = 2'O-methyl guanosine
  modified_base 20: mod_base = OTHER; note = 2'O-methyl uridine phosphorothioate
  modified_base 21: mod_base = OTHER; note = 2'O-methyl uridine
ctactcctacttggagtcgtt

SEQ ID NO: 318 - RNA, 21 nt, synthetic construct
  source 1..21: mol_type = other RNA
  modified_base 1: mod_base = OTHER; note = 2'O-methyl cytidine phosphorothioate
  modified_base 2: mod_base = OTHER; note = 2'O-methyl cytidine phosphorothioate
  modified_base 3: mod_base = OTHER; note = 2'O-methyl uridine
  modified_base 4: mod_base = OTHER; note = 2'O-methyl adenosine
  modified_base 5: mod_base = OTHER; note = 2'O-methyl cytidine
  modified_base 6: mod_base = OTHER; note = 2'O-methyl uridine
  modified_base 7: mod_base = OTHER; note = 2'-fluoro uridine
  modified_base 8: mod_base = OTHER; note = 2'O-methyl guanosine
  modified_base 9: mod_base = OTHER; note = 2'-fluoro guanosine
  modified_base 10: mod_base = OTHER; note = 2'-fluoro adenosine
  modified_base 11: mod_base = OTHER; note = 2'-fluoro guanosine
  modified_base 12: mod_base = OTHER; note = 2'O-methyl uridine
  modified_base 13: mod_base = OTHER; note = 2'O-methyl cytidine
  modified_base 14: mod_base = OTHER; note = 2'O-methyl guanosine
  modified_base 15: mod_base = OTHER; note = 2'O-methyl uridine
  modified_base 16: mod_base = OTHER; note = 2'O-methyl uridine
  modified_base 17: mod_base = OTHER; note = 2'O-methyl guanosine
  modified_base 18: mod_base = OTHER; note = 2'O-methyl guanosine
  modified_base 19: mod_base = OTHER; note = 2'O-methyl uridine
  modified_base 20: mod_base = OTHER; note = 2'O-methyl guanosine phosphorothioate
  modified_base 21: mod_base = OTHER; note = 2'O-methyl adenosine
cctacttggagtcgttggtga

SEQ ID NO: 319 - RNA, 21 nt, synthetic construct
  source 1..21: mol_type = other RNA
  modified_base 1: mod_base = OTHER; note = 2'O-methyl cytidine phosphorothioate
  modified_base 2: mod_base = OTHER; note = 2'O-methyl uridine phosphorothioate
  modified_base 3: mod_base = OTHER; note = 2'O-methyl adenosine
  modified_base 4: mod_base = OTHER; note = 2'O-methyl cytidine
  modified_base 5: mod_base = OTHER; note = 2'O-methyl uridine
  modified_base 6: mod_base = OTHER; note = 2'O-methyl uridine
  modified_base 7: mod_base = OTHER; note = 2'-fluoro guanosine
  modified_base 8: mod_base = OTHER; note = 2'O-methyl guanosine
  modified_base 9: mod_base = OTHER; note = 2'-fluoro adenosine
  modified_base 10: mod_base = OTHER; note = 2'-fluoro guanosine
  modified_base 11: mod_base = OTHER; note = 2'-fluoro uridine
  modified_base 12: mod_base = OTHER; note = 2'O-methyl cytidine
  modified_base 13: mod_base = OTHER; note = 2'O-methyl guanosine
  modified_base 14: mod_base = OTHER; note = 2'O-methyl uridine
  modified_base 15: mod_base = OTHER; note = 2'O-methyl uridine
  modified_base 16: mod_base = OTHER; note = 2'O-methyl guanosine
  modified_base 17: mod_base = OTHER; note = 2'O-methyl guanosine
  modified_base 18: mod_base = OTHER; note = 2'O-methyl uridine
  modified_base 19: mod_base = OTHER; note = 2'O-methyl guanosine
  modified_base 20: mod_base = OTHER; note = 2'O-methyl adenosine phosphorothioate
  modified_base 21: mod_base = OTHER; note = 2'O-methyl adenosine
ctacttggagtcgttggtgaa

SEQ ID NO: 320 - RNA, 21 nt, synthetic construct
  source 1..21: mol_type = other RNA
  modified_base 1: mod_base = OTHER; note = 2'O-methyl cytidine phosphorothioate
  modified_base 2: mod_base = OTHER; note = 2'O-methyl uridine phosphorothioate
  modified_base 3: mod_base = OTHER; note = 2'O-methyl uridine
  modified_base 4: mod_base = OTHER; note = 2'O-methyl guanosine
  modified_base 5: mod_base = OTHER; note = 2'O-methyl guanosine
  modified_base 6: mod_base = OTHER; note = 2'O-methyl adenosine
  modified_base 7: mod_base = OTHER; note = 2'-fluoro guanosine
  modified_base 8: mod_base = OTHER; note = 2'O-methyl uridine
  modified_base 9: mod_base = OTHER; note = 2'-fluoro cytidine
  modified_base 10: mod_base = OTHER; note = 2'-fluoro guanosine
  modified_base 11: mod_base = OTHER; note = 2'-fluoro uridine
  modified_base 12: mod_base = OTHER; note = 2'O-methyl uridine
  modified_base 13: mod_base = OTHER; note = 2'O-methyl guanosine
  modified_base 14: mod_base = OTHER; note = 2'O-methyl guanosine
  modified_base 15: mod_base = OTHER; note = 2'O-methyl uridine
  modified_base 16: mod_base = OTHER; note = 2'O-methyl guanosine
  modified_base 17: mod_base = OTHER; note = 2'O-methyl adenosine
  modified_base 18: mod_base = OTHER; note = 2'O-methyl adenosine
  modified_base 19: mod_base = OTHER; note = 2'O-methyl guanosine
  modified_base 20: mod_base = OTHER; note = 2'O-methyl uridine phosphorothioate
  modified_base 21: mod_base = OTHER; note = 2'O-methyl uridine
cttggagtcgttggtgaagtt

SEQ ID NO: 321 - RNA, 21 nt, synthetic construct
  source 1..21: mol_type = other RNA
  modified_base 1: mod_base = OTHER; note = 2'O-methyl uridine phosphorothioate
  modified_base 2: mod_base = OTHER; note = 2'O-methyl guanosine phosphorothioate
  modified_base 3: mod_base = OTHER; note = 2'O-methyl guanosine
  modified_base 4: mod_base = OTHER; note = 2'O-methyl adenosine
  modified_base 5: mod_base = OTHER; note = 2'O-methyl guanosine
  modified_base 6: mod_base = OTHER; note = 2'O-methyl uridine
  modified_base 7: mod_base = OTHER; note = 2'-fluoro cytidine
  modified_base 8: mod_base = OTHER; note = 2'O-methyl guanosine
  modified_base 9: mod_base = OTHER; note = 2'-fluoro uridine
  modified_base 10: mod_base = OTHER; note = 2'-fluoro uridine
  modified_base 11: mod_base = OTHER; note = 2'-fluoro guanosine
  modified_base 12: mod_base = OTHER; note = 2'O-methyl guanosine
  modified_base 13: mod_base = OTHER; note = 2'O-methyl uridine
  modified_base 14: mod_base = OTHER; note = 2'O-methyl guanosine
  modified_base 15: mod_base = OTHER; note = 2'O-methyl adenosine
  modified_base 16: mod_base = OTHER; note = 2'O-methyl adenosine
  modified_base 17: mod_base = OTHER; note = 2'O-methyl guanosine
  modified_base 18: mod_base = OTHER; note = 2'O-methyl uridine
  modified_base 19: mod_base = OTHER; note = 2'O-methyl uridine
  modified_base 20: mod_base = OTHER; note = 2'O-methyl uridine phosphorothioate
  modified_base 21: mod_base = OTHER; note = 2'O-methyl uridine
tggagtcgttggtgaagtttt

SEQ ID NO: 322 - RNA, 21 nt, synthetic construct
  source 1..21: mol_type = other RNA
  modified_base 1: mod_base = OTHER; note = 2'O-methyl uridine phosphorothioate
  modified_base 2: mod_base = OTHER; note = 2'O-methyl uridine phosphorothioate
  modified_base 3: mod_base = OTHER; note = 2'O-methyl guanosine
  modified_base 4: mod_base = OTHER; note = 2'O-methyl guanosine
  modified_base 5: mod_base = OTHER; note = 2'O-methyl uridine
  modified_base 6: mod_base = OTHER; note = 2'O-methyl guanosine
  modified_base 7: mod_base = OTHER; note = 2'-fluoro adenosine
  modified_base 8: mod_base = OTHER; note = 2'O-methyl adenosine
  modified_base 9: mod_base = OTHER; note = 2'-fluoro guanosine
  modified_base 10: mod_base = OTHER; note = 2'-fluoro uridine
  modified_base 11: mod_base = OTHER; note = 2'-fluoro uridine
  modified_base 12: mod_base = OTHER; note = 2'O-methyl uridine
  modified_base 13: mod_base = OTHER; note = 2'O-methyl uridine
  modified_base 14: mod_base = OTHER; note = 2'O-methyl uridine
  modified_base 15: mod_base = OTHER; note = 2'O-methyl cytidine
  modified_base 16: mod_base = OTHER; note = 2'O-methyl adenosine
  modified_base 17: mod_base = OTHER; note = 2'O-methyl uridine
  modified_base 18: mod_base = OTHER; note = 2'O-methyl uridine
  modified_base 19: mod_base = OTHER; note = 2'O-methyl cytidine
  modified_base 20: mod_base = OTHER; note = 2'O-methyl cytidine phosphorothioate
  modified_base 21: mod_base = OTHER; note = 2'O-methyl uridine
ttggtgaagtttttcattcct

SEQ ID NO: 323 - RNA, 21 nt, synthetic construct
  source 1..21: mol_type = other RNA
  modified_base 1: mod_base = OTHER; note = 2'O-methyl guanosine phosphorothioate
  modified_base 2: mod_base = OTHER; note = 2'O-methyl guanosine phosphorothioate
  modified_base 3: mod_base = OTHER; note = 2'O-methyl uridine
  modified_base 4: mod_base = OTHER; note = 2'O-methyl guanosine
  modified_base 5: mod_base = OTHER; note = 2'O-methyl adenosine
  modified_base 6: mod_base = OTHER; note = 2'O-methyl adenosine
  modified_base 7: mod_base = OTHER; note = 2'-fluoro guanosine
  modified_base 8: mod_base = OTHER; note = 2'O-methyl uridine
  modified_base 9: mod_base = OTHER; note = 2'-fluoro uridine
  modified_base 10: mod_base = OTHER; note = 2'-fluoro uridine
  modified_base 11: mod_base = OTHER; note = 2'-fluoro uridine
  modified_base 12: mod_base = OTHER; note = 2'O-methyl uridine
  modified_base 13: mod_base = OTHER; note = 2'O-methyl cytidine
  modified_base 14: mod_base = OTHER; note = 2'O-methyl adenosine
  modified_base 15: mod_base = OTHER; note = 2'O-methyl uridine
  modified_base 16: mod_base = OTHER; note = 2'O-methyl uridine
  modified_base 17: mod_base = OTHER; note = 2'O-methyl cytidine
  modified_base 18: mod_base = OTHER; note = 2'O-methyl cytidine
  modified_base 19: mod_base = OTHER; note = 2'O-methyl uridine
  modified_base 20: mod_base = OTHER; note = 2'O-methyl cytidine phosphorothioate
  modified_base 21: mod_base = OTHER; note = 2'O-methyl adenosine
ggtgaagtttttcattcctca

SEQ ID NO: 324 - RNA, 21 nt, synthetic construct
  source 1..21: mol_type = other RNA
  modified_base 1: mod_base = OTHER; note = 2'O-methyl guanosine phosphorothioate
  modified_base 2: mod_base = OTHER; note = 2'O-methyl guanosine phosphorothioate
  modified_base 3: mod_base = OTHER; note = 2'O-methyl adenosine
  modified_base 4: mod_base = OTHER; note = 2'O-methyl adenosine
  modified_base 5: mod_base = OTHER; note = 2'O-methyl uridine
  modified_base 6: mod_base = OTHER; note = 2'O-methyl adenosine
  modified_base 7: mod_base = OTHER; note = 2'-fluoro guanosine
  modified_base 8: mod_base = OTHER; note = 2'O-methyl guanosine
  modified_base 9: mod_base = OTHER; note = 2'-fluoro cytidine
  modified_base 10: mod_base = OTHER; note = 2'-fluoro adenosine
  modified_base 11: mod_base = OTHER; note = 2'-fluoro guanosine
  modified_base 12: mod_base = OTHER; note = 2'O-methyl guanosine
  modified_base 13: mod_base = OTHER; note = 2'O-methyl cytidine
  modified_base 14: mod_base = OTHER; note = 2'O-methyl adenosine
  modified_base 15: mod_base = OTHER; note = 2'O-methyl guanosine
  modified_base 16: mod_base = OTHER; note = 2'O-methyl adenosine
  modified_base 17: mod_base = OTHER; note = 2'O-methyl cytidine
  modified_base 18: mod_base = OTHER; note = 2'O-methyl uridine
  modified_base 19: mod_base = OTHER; note = 2'O-methyl adenosine
  modified_base 20: mod_base = OTHER; note = 2'O-methyl cytidine phosphorothioate
  modified_base 21: mod_base = OTHER; note = 2'O-methyl uridine
ggaataggcaggcagactact

SEQ ID NO: 325 - RNA, 21 nt, synthetic construct
  source 1..21: mol_type = other RNA
  modified_base 1: mod_base = OTHER; note = 2'O-methyl guanosine phosphorothioate
  modified_base 2: mod_base = OTHER; note = 2'O-methyl adenosine phosphorothioate
  modified_base 3: mod_base = OTHER; note = 2'O-methyl adenosine
  modified_base 4: mod_base = OTHER; note = 2'O-methyl uridine
  modified_base 5: mod_base = OTHER; note = 2'O-methyl adenosine
  modified_base 6: mod_base = OTHER; note = 2'O-methyl guanosine
  modified_base 7: mod_base = OTHER; note = 2'-fluoro guanosine
  modified_base 8: mod_base = OTHER; note = 2'O-methyl cytidine
  modified_base 9: mod_base = OTHER; note = 2'-fluoro adenosine
  modified_base 10: mod_base = OTHER; note = 2'-fluoro guanosine
  modified_base 11: mod_base = OTHER; note = 2'-fluoro guanosine
  modified_base 12: mod_base = OTHER; note = 2'O-methyl cytidine
  modified_base 13: mod_base = OTHER; note = 2'O-methyl adenosine
  modified_base 14: mod_base = OTHER; note = 2'O-methyl guanosine
  modified_base 15: mod_base = OTHER; note = 2'O-methyl adenosine
  modified_base 16: mod_base = OTHER; note = 2'O-methyl cytidine
  modified_base 17: mod_base = OTHER; note = 2'O-methyl uridine
  modified_base 18: mod_base = OTHER; note = 2'O-methyl adenosine
  modified_base 19: mod_base = OTHER; note = 2'O-methyl cytidine
  modified_base 20: mod_base = OTHER; note = 2'O-methyl uridine phosphorothioate
  modified_base 21: mod_base = OTHER; note = 2'O-methyl uridine
gaataggcaggcagactactt

SEQ ID NO: 326 - RNA, 21 nt, synthetic construct
  source 1..21: mol_type = other RNA
  modified_base 1: mod_base = OTHER; note = 2'O-methyl adenosine phosphorothioate
  modified_base 2: mod_base = OTHER; note = 2'O-methyl adenosine phosphorothioate
  modified_base 3: mod_base = OTHER; note = 2'O-methyl uridine
  modified_base 4: mod_base = OTHER; note = 2'O-methyl adenosine
  modified_base 5: mod_base = OTHER; note = 2'O-methyl guanosine
  modified_base 6: mod_base = OTHER; note = 2'O-methyl guanosine
  modified_base 7: mod_base = OTHER; note = 2'-fluoro cytidine
  modified_base 8: mod_base = OTHER; note = 2'O-methyl adenosine
  modified_base 9: mod_base = OTHER; note = 2'-fluoro guanosine
  modified_base 10: mod_base = OTHER; note = 2'-fluoro guanosine
  modified_base 11: mod_base = OTHER; note = 2'-fluoro cytidine
  modified_base 12: mod_base = OTHER; note = 2'O-methyl adenosine
  modified_base 13: mod_base = OTHER; note = 2'O-methyl guanosine
  modified_base 14: mod_base = OTHER; note = 2'O-methyl adenosine
  modified_base 15: mod_base = OTHER; note = 2'O-methyl cytidine
  modified_base 16: mod_base = OTHER; note = 2'O-methyl uridine
  modified_base 17: mod_base = OTHER; note = 2'O-methyl adenosine
  modified_base 18: mod_base = OTHER; note = 2'O-methyl cytidine
  modified_base 19: mod_base = OTHER; note = 2'O-methyl uridine
  modified_base 20: mod_base = OTHER; note = 2'O-methyl uridine phosphorothioate
  modified_base 21: mod_base = OTHER; note = 2'O-methyl adenosine
aataggcaggcagactactta

SEQ ID NO: 327 - RNA, 21 nt, synthetic construct
  source 1..21: mol_type = other RNA
  modified_base 1: mod_base = OTHER; note = 2'O-methyl adenosine phosphorothioate
  modified_base 2: mod_base = OTHER; note = 2'O-methyl uridine phosphorothioate
  modified_base 3: mod_base = OTHER; note = 2'O-methyl adenosine
  modified_base 4: mod_base = OTHER; note = 2'O-methyl guanosine
  modified_base 5: mod_base = OTHER; note = 2'O-methyl guanosine
  modified_base 6: mod_base = OTHER; note = 2'O-methyl cytidine
  modified_base 7: mod_base = OTHER; note = 2'-fluoro adenosine
  modified_base 8: mod_base = OTHER; note = 2'O-methyl guanosine
  modified_base 9: mod_base = OTHER; note = 2'-fluoro guanosine
  modified_base 10: mod_base = OTHER; note = 2'-fluoro cytidine
  modified_base 11: mod_base = OTHER; note = 2'-fluoro adenosine
  modified_base 12: mod_base = OTHER; note = 2'O-methyl guanosine
  modified_base 13: mod_base = OTHER; note = 2'O-methyl adenosine
  modified_base 14: mod_base = OTHER; note = 2'O-methyl cytidine
  modified_base 15: mod_base = OTHER; note = 2'O-methyl uridine
  modified_base 16: mod_base = OTHER; note = 2'O-methyl adenosine
  modified_base 17: mod_base = OTHER; note = 2'O-methyl cytidine
  modified_base 18: mod_base = OTHER; note = 2'O-methyl uridine
  modified_base 19: mod_base = OTHER; note = 2'O-methyl uridine
  modified_base 20: mod_base = OTHER; note = 2'O-methyl adenosine phosphorothioate
  modified_base 21: mod_base = OTHER; note = 2'O-methyl uridine
ataggcaggcagactacttat

SEQ ID NO: 328 - RNA, 21 nt, synthetic construct
  source 1..21: mol_type = other RNA
  modified_base 1: mod_base = OTHER; note = 2'O-methyl adenosine phosphorothioate
  modified_base 2: mod_base = OTHER; note = 2'O-methyl guanosine phosphorothioate
  modified_base 3: mod_base = OTHER; note = 2'O-methyl guanosine
  modified_base 4: mod_base = OTHER; note = 2'O-methyl cytidine
  modified_base 5: mod_base = OTHER; note = 2'O-methyl adenosine
  modified_base 6: mod_base = OTHER; note = 2'O-methyl guanosine
  modified_base 7: mod_base = OTHER; note = 2'-fluoro guanosine
  modified_base 8: mod_base = OTHER; note = 2'O-methyl cytidine
  modified_base 9: mod_base = OTHER; note = 2'-fluoro adenosine
  modified_base 10: mod_base = OTHER; note = 2'-fluoro guanosine
  modified_base 11: mod_base = OTHER; note = 2'-fluoro adenosine
  modified_base 12: mod_base = OTHER; note = 2'O-methyl cytidine
  modified_base 13: mod_base = OTHER; note = 2'O-methyl uridine
  modified_base 14: mod_base = OTHER; note = 2'O-methyl adenosine
  modified_base 15: mod_base = OTHER; note = 2'O-methyl cytidine
  modified_base 16: mod_base = OTHER; note = 2'O-methyl uridine
  modified_base 17: mod_base = OTHER; note = 2'O-methyl uridine
  modified_base 18: mod_base = OTHER; note = 2'O-methyl adenosine
  modified_base 19: mod_base = OTHER; note = 2'O-methyl uridine
  modified_base 20: mod_base = OTHER; note = 2'O-methyl guanosine phosphorothioate
  modified_base 21: mod_base = OTHER; note = 2'O-methyl adenosine
aggcaggcagactacttatga

SEQ ID NO: 329 - RNA, 21 nt, synthetic construct
  source 1..21: mol_type = other RNA
  modified_base 1: mod_base = OTHER; note = 2'O-methyl guanosine phosphorothioate
  modified_base 2: mod_base = OTHER; note = 2'O-methyl guanosine phosphorothioate
  modified_base 3: mod_base = OTHER; note = 2'O-methyl cytidine
  modified_base 4: mod_base = OTHER; note = 2'O-methyl adenosine
  modified_base 5: mod_base = OTHER; note = 2'O-methyl guanosine
  modified_base 6: mod_base = OTHER; note = 2'O-methyl guanosine
  modified_base 7: mod_base = OTHER; note = 2'-fluoro cytidine
  modified_base 8: mod_base = OTHER; note = 2'O-methyl adenosine
  modified_base 9: mod_base = OTHER; note = 2'-fluoro guanosine
  modified_base 10: mod_base = OTHER; note = 2'-fluoro adenosine
  modified_base 11: mod_base = OTHER; note = 2'-fluoro cytidine
  modified_base 12: mod_base = OTHER; note = 2'O-methyl uridine
  modified_base 13: mod_base = OTHER; note = 2'O-methyl adenosine
  modified_base 14: mod_base = OTHER; note = 2'O-methyl cytidine
  modified_base 15: mod_base = OTHER; note = 2'O-methyl uridine
  modified_base 16: mod_base = OTHER; note = 2'O-methyl uridine
  modified_base 17: mod_base = OTHER; note = 2'O-methyl adenosine
  modified_base 18: mod_base = OTHER; note = 2'O-methyl uridine
  modified_base 19: mod_base = OTHER; note = 2'O-methyl guanosine
  modified_base 20: mod_base = OTHER; note = 2'O-methyl adenosine phosphorothioate
  modified_base 21: mod_base = OTHER; note = 2'O-methyl adenosine
ggcaggcagactacttatgaa

SEQ ID NO: 330 - RNA, 21 nt, synthetic construct
  source 1..21: mol_type = other RNA
  modified_base 1: mod_base = OTHER; note = 2'O-methyl uridine phosphorothioate
  modified_base 2: mod_base = OTHER; note = 2'O-methyl adenosine phosphorothioate
  modified_base 3: mod_base = OTHER; note = 2'O-methyl uridine
  modified_base 4: mod_base = OTHER; note = 2'O-methyl uridine
  modified_base 5: mod_base = OTHER; note = 2'O-methyl guanosine
  modified_base 6: mod_base = OTHER; note = 2'O-methyl guanosine
  modified_base 7: mod_base = OTHER; note = 2'-fluoro uridine
  modified_base 8: mod_base = OTHER; note = 2'O-methyl uridine
  modified_base 9: mod_base = OTHER; note = 2'-fluoro cytidine
  modified_base 10: mod_base = OTHER; note = 2'-fluoro uridine
  modified_base 11: mod_base = OTHER; note = 2'-fluoro guanosine
  modified_base 12: mod_base = OTHER; note = 2'O-methyl uridine
  modified_base 13: mod_base = OTHER; note = 2'O-methyl guanosine
  modified_base 14: mod_base = OTHER; note = 2'O-methyl guanosine
  modified_base 15: mod_base = OTHER; note = 2'O-methyl guanosine
  modified_base 16: mod_base = OTHER; note = 2'O-methyl adenosine
  modified_base 17: mod_base = OTHER; note = 2'O-methyl uridine
  modified_base 18: mod_base = OTHER; note = 2'O-methyl adenosine
  modified_base 19: mod_base = OTHER; note = 2'O-methyl uridine
  modified_base 20: mod_base = OTHER; note = 2'O-methyl uridine phosphorothioate
  modified_base 21: mod_base = OTHER; note = 2'O-methyl adenosine
tattggttctgtgggatatta

SEQ ID NO: 331 - RNA, 21 nt, synthetic construct
  source 1..21: mol_type = other RNA
  modified_base 1: mod_base = OTHER; note = 2'O-methyl uridine phosphorothioate
  modified_base 2: mod_base = OTHER; note = 2'O-methyl uridine phosphorothioate
  modified_base 3: mod_base = OTHER; note = 2'O-methyl guanosine
  modified_base 4: mod_base = OTHER; note = 2'O-methyl guanosine
  modified_base 5: mod_base = OTHER; note = 2'O-methyl uridine
  modified_base 6: mod_base = OTHER; note = 2'O-methyl uridine
  modified_base 7: mod_base = OTHER; note = 2'-fluoro cytidine
  modified_base 8: mod_base = OTHER; note = 2'O-methyl uridine
  modified_base 9: mod_base = OTHER; note = 2'-fluoro guanosine
  modified_base 10: mod_base = OTHER; note = 2'-fluoro uridine
  modified_base 11: mod_base = OTHER; note = 2'-fluoro guanosine
  modified_base 12: mod_base = OTHER; note = 2'O-methyl guanosine
  modified_base 13: mod_base = OTHER; note = 2'O-methyl guanosine
  modified_base 14: mod_base = OTHER; note = 2'O-methyl adenosine
  modified_base 15: mod_base = OTHER; note = 2'O-methyl uridine
  modified_base 16: mod_base = OTHER; note = 2'O-methyl adenosine
  modified_base 17: mod_base = OTHER; note = 2'O-methyl uridine
  modified_base 18: mod_base = OTHER; note = 2'O-methyl uridine
  modified_base 19: mod_base = OTHER; note = 2'O-methyl adenosine
  modified_base 20: mod_base = OTHER; note = 2'O-methyl adenosine phosphorothioate
  modified_base 21: mod_base = OTHER; note = 2'O-methyl uridine
ttggttctgtgggatattaat

SEQ ID NO: 332 - RNA, 21 nt, synthetic construct
  source 1..21: mol_type = other RNA
  modified_base 1: mod_base = OTHER; note = 2'O-methyl guanosine phosphorothioate
  modified_base 2: mod_base = OTHER; note = 2'O-methyl guanosine phosphorothioate
  modified_base 3: mod_base = OTHER; note = 2'O-methyl uridine
  modified_base 4: mod_base = OTHER; note = 2'O-methyl uridine
  modified_base 5: mod_base = OTHER; note = 2'O-methyl cytidine
  modified_base 6: mod_base = OTHER; note = 2'O-methyl uridine
  modified_base 7: mod_base = OTHER; note = 2'-fluoro guanosine
  modified_base 8: mod_base = OTHER; note = 2'O-methyl uridine
  modified_base 9: mod_base = OTHER; note = 2'-fluoro guanosine
  modified_base 10: mod_base = OTHER; note = 2'-fluoro guanosine
  modified_base 11: mod_base = OTHER; note = 2'-fluoro guanosine
  modified_base 12: mod_base = OTHER; note = 2'O-methyl adenosine
  modified_base 13: mod_base = OTHER; note = 2'O-methyl uridine
  modified_base 14: mod_base = OTHER; note = 2'O-methyl adenosine
  modified_base 15: mod_base = OTHER; note = 2'O-methyl uridine
  modified_base 16: mod_base = OTHER; note = 2'O-methyl uridine
  modified_base 17: mod_base = OTHER; note = 2'O-methyl adenosine
  modified_base 18: mod_base = OTHER; note = 2'O-methyl adenosine
  modified_base 19: mod_base = OTHER; note = 2'O-methyl uridine
  modified_base 20: mod_base = OTHER; note = 2'O-methyl adenosine phosphorothioate
  modified_base 21: mod_base = OTHER; note = 2'O-methyl adenosine
ggttctgtgggatattaataa

SEQ ID NO: 333 - RNA, 21 nt, synthetic construct
  source 1..21: mol_type = other RNA
  modified_base 1: mod_base = OTHER; note = 2'O-methyl adenosine phosphorothioate
  modified_base 2: mod_base = OTHER; note = 2'O-methyl uridine phosphorothioate
  modified_base 3: mod_base = OTHER; note = 2'O-methyl guanosine
  modified_base 4: mod_base = OTHER; note = 2'O-methyl uridine
  modified_base 5: mod_base = OTHER; note = 2'O-methyl guanosine
  modified_base 6: mod_base = OTHER; note = 2'O-methyl guanosine
  modified_base 7: mod_base = OTHER; note = 2'-fluoro uridine
  modified_base 8: mod_base = OTHER; note = 2'O-methyl adenosine
  modified_base 9: mod_base = OTHER; note = 2'-fluoro guanosine
  modified_base 10: mod_base = OTHER; note = 2'-fluoro adenosine
  modified_base 11: mod_base = OTHER; note = 2'-fluoro cytidine
  modified_base 12: mod_base = OTHER; note = 2'O-methyl uridine
  modified_base 13: mod_base = OTHER; note = 2'O-methyl guanosine
  modified_base 14: mod_base = OTHER; note = 2'O-methyl cytidine
  modified_base 15: mod_base = OTHER; note = 2'O-methyl adenosine
  modified_base 16: mod_base = OTHER; note = 2'O-methyl guanosine
  modified_base 17: mod_base = OTHER; note = 2'O-methyl cytidine
  modified_base 18: mod_base = OTHER; note = 2'O-methyl adenosine
  modified_base 19: mod_base = OTHER; note = 2'O-methyl adenosine
  modified_base 20: mod_base = OTHER; note = 2'O-methyl cytidine phosphorothioate
  modified_base 21: mod_base = OTHER; note = 2'O-methyl adenosine
atgtggtagactgcagcaaca

SEQ ID NO: 334 - RNA, 21 nt, synthetic construct
  source 1..21: mol_type = other RNA
  modified_base 1: mod_base = OTHER; note = 2'O-methyl cytidine phosphorothioate
  modified_base 2: mod_base = OTHER; note = 2'O-methyl uridine phosphorothioate
  modified_base 3: mod_base = OTHER; note = 2'O-methyl guanosine
  modified_base 4: mod_base = OTHER; note = 2'O-methyl cytidine
  modified_base 5: mod_base = OTHER; note = 2'O-methyl adenosine
  modified_base 6: mod_base = OTHER; note = 2'O-methyl guanosine
  modified_base 7: mod_base = OTHER; note = 2'-fluoro cytidine
  modified_base 8: mod_base = OTHER; note = 2'O-methyl adenosine
  modified_base 9: mod_base = OTHER; note = 2'-fluoro adenosine
  modified_base 10: mod_base = OTHER; note = 2'-fluoro cytidine
  modified_base 11: mod_base = OTHER; note = 2'-fluoro adenosine
  modified_base 12: mod_base = OTHER; note = 2'O-methyl guanosine
  modified_base 13: mod_base = OTHER; note = 2'O-methyl adenosine
  modified_base 14: mod_base = OTHER; note = 2'O-methyl guanosine
  modified_base 15: mod_base = OTHER; note = 2'O-methyl adenosine
  modified_base 16: mod_base = OTHER; note = 2'O-methyl adenosine
  modified_base 17: mod_base = OTHER; note = 2'O-methyl guanosine
  modified_base 18: mod_base = OTHER; note = 2'O-methyl adenosine
  modified_base 19: mod_base = OTHER; note = 2'O-methyl guanosine
  modified_base 20: mod_base = OTHER; note = 2'O-methyl adenosine phosphorothioate
  modified_base 21: mod_base = OTHER; note = 2'O-methyl uridine
ctgcagcaacagagaagagat

SEQ ID NO: 335 - RNA, 21 nt, synthetic construct
  source 1..21: mol_type = other RNA
  modified_base 1: mod_base = OTHER; note = 2'O-methyl adenosine phosphorothioate
  modified_base 2: mod_base = OTHER; note = 2'O-methyl adenosine phosphorothioate
  modified_base 3: mod_base = OTHER; note = 2'O-methyl adenosine
  modified_base 4: mod_base = OTHER; note = 2'O-methyl uridine
  modified_base 5: mod_base = OTHER; note = 2'O-methyl cytidine
  modified_base 6: mod_base = OTHER; note = 2'O-methyl adenosine
  modified_base 7: mod_base = OTHER; note = 2'-fluoro guanosine
  modified_base 8: mod_base = OTHER; note = 2'O-methyl guanosine
  modified_base 9: mod_base = OTHER; note = 2'-fluoro uridine
  modified_base 10: mod_base = OTHER; note = 2'-fluoro guanosine
  modified_base 11: mod_base = OTHER; note = 2'-fluoro adenosine
  modified_base 12: mod_base = OTHER; note = 2'O-methyl adenosine
  modified_base 13: mod_base = OTHER; note = 2'O-methyl guanosine
  modified_base 14: mod_base = OTHER; note = 2'O-methyl adenosine
  modified_base 15: mod_base = OTHER; note = 2'O-methyl adenosine
  modified_base 16: mod_base = OTHER; note = 2'O-methyl adenosine
  modified_base 17: mod_base = OTHER; note = 2'O-methyl guanosine
  modified_base 18: mod_base = OTHER; note = 2'O-methyl adenosine
  modified_base 19: mod_base = OTHER; note = 2'O-methyl adenosine
  modified_base 20: mod_base = OTHER; note = 2'O-methyl guanosine phosphorothioate
  modified_base 21: mod_base = OTHER; note = 2'O-methyl uridine
aaatcaggtgaagaaagaagt

SEQ ID NO: 336 - RNA, 21 nt, synthetic construct
  source 1..21: mol_type = other RNA
  modified_base 1: mod_base = OTHER; note = 2'O-methyl guanosine phosphorothioate
  modified_base 2: mod_base = OTHER; note = 2'O-methyl adenosine phosphorothioate
  modified_base 3: mod_base = OTHER; note = 2'O-methyl adenosine
  modified_base 4: mod_base = OTHER; note = 2'O-methyl guanosine
  modified_base 5: mod_base = OTHER; note = 2'O-methyl adenosine
  modified_base 6: mod_base = OTHER; note = 2'O-methyl adenosine
  modified_base 7: mod_base = OTHER; note = 2'-fluoro adenosine
  modified_base 8: mod_base = OTHER; note = 2'O-methyl guanosine
  modified_base 9: mod_base = OTHER; note = 2'-fluoro adenosine
  modified_base 10: mod_base = OTHER; note = 2'-fluoro adenosine
  modified_base 11: mod_base = OTHER; note = 2'-fluoro guanosine
  modified_base 12: mod_base = OTHER; note = 2'O-methyl uridine
  modified_base 13: mod_base = OTHER; note = 2'O-methyl guanosine
  modified_base 14: mod_base = OTHER; note = 2'O-methyl guanosine
  modified_base 15: mod_base = OTHER; note = 2'O-methyl guanosine
  modified_base 16: mod_base = OTHER; note = 2'O-methyl uridine
  modified_base 17: mod_base = OTHER; note = 2'O-methyl guanosine
  modified_base 18: mod_base = OTHER; note = 2'O-methyl adenosine
  modified_base 19: mod_base = OTHER; note = 2'O-methyl uridine
  modified_base 20: mod_base = OTHER; note = 2'O-methyl guanosine phosphorothioate
  modified_base 21: mod_base = OTHER; note = 2'O-methyl uridine
gaagaaagaagtgggtgatgt

SEQ ID NO: 337 - RNA, 21 nt, synthetic construct
  source 1..21: mol_type = other RNA
  modified_base 1: mod_base = OTHER; note = 2'O-methyl cytidine phosphorothioate
  modified_base 2: mod_base = OTHER; note = 2'O-methyl cytidine phosphorothioate
  modified_base 3: mod_base = OTHER; note = 2'O-methyl adenosine
  modified_base 4: mod_base = OTHER; note = 2'O-methyl adenosine
  modified_base 5: mod_base = OTHER; note = 2'O-methyl guanosine
  modified_base 6: mod_base = OTHER; note = 2'O-methyl guanosine
  modified_base 7: mod_base = OTHER; note = 2'-fluoro adenosine
  modified_base 8: mod_base = OTHER; note = 2'O-methyl uridine
  modified_base 9: mod_base = OTHER; note = 2'-fluoro guanosine
  modified_base 10: mod_base = OTHER; note = 2'-fluoro adenosine
  modified_base 11: mod_base = OTHER; note = 2'-fluoro adenosine
  modified_base 12: mod_base = OTHER; note = 2'O-methyl guanosine
  modified_base 13: mod_base = OTHER; note = 2'O-methyl adenosine
  modified_base 14: mod_base = OTHER; note = 2'O-methyl guanosine
  modified_base 15: mod_base = OTHER; note = 2'O-methyl adenosine
  modified_base 16: mod_base = OTHER; note = 2'O-methyl uridine
  modified_base 17: mod_base = OTHER; note = 2'O-methyl uridine
  modified_base 18: mod_base = OTHER; note = 2'O-methyl adenosine
  modified_base 19: mod_base = OTHER; note = 2'O-methyl cytidine
  modified_base 20: mod_base = OTHER; note = 2'O-methyl cytidine phosphorothioate
  modified_base 21: mod_base = OTHER; note = 2'O-methyl adenosine
ccaaggatgaagagattacca

SEQ ID NO: 338 - RNA, 21 nt, synthetic construct
  source 1..21: mol_type = other RNA
  modified_base 1: mod_base = OTHER; note = 2'O-methyl guanosine phosphorothioate
  modified_base 2: mod_base = OTHER; note = 2'O-methyl adenosine phosphorothioate
  modified_base 3: mod_base = OTHER; note = 2'O-methyl adenosine
  modified_base 4: mod_base = OTHER; note = 2'O-methyl guanosine
  modified_base 5: mod_base = OTHER; note = 2'O-methyl adenosine
  modified_base 6: mod_base = OTHER; note = 2'O-methyl guanosine
  modified_base 7: mod_base = OTHER; note = 2'-fluoro adenosine
  modified_base 8: mod_base = OTHER; note = 2'O-methyl uridine
  modified_base 9: mod_base = OTHER; note = 2'-fluoro uridine
  modified_base 10: mod_base = OTHER; note = 2'-fluoro adenosine
  modified_base 11: mod_base = OTHER; note = 2'-fluoro cytidine
  modified_base 12: mod_base = OTHER; note = 2'O-methyl cytidine
  modified_base 13: mod_base = OTHER; note = 2'O-methyl adenosine
  modified_base 14: mod_base = OTHER; note = 2'O-methyl adenosine
  modified_base 15: mod_base = OTHER; note = 2'O-methyl guanosine
  modified_base 16: mod_base = OTHER; note = 2'O-methyl adenosine
  modified_base 17: mod_base = OTHER; note = 2'O-methyl cytidine
  modified_base 18: mod_base = OTHER; note = 2'O-methyl adenosine
  modified_base 19: mod_base = OTHER; note = 2'O-methyl uridine
  modified_base 20: mod_base = OTHER; note = 2'O-methyl uridine phosphorothioate
  modified_base 21: mod_base = OTHER; note = 2'O-methyl uridine
gaagagattaccaagacattt

SEQ ID NO: 339 - RNA, 21 nt, synthetic construct
  source 1..21: mol_type = other RNA
  modified_base 1: mod_base = OTHER; note = 2'O-methyl adenosine phosphorothioate
  modified_base 2: mod_base = OTHER; note = 2'O-methyl guanosine phosphorothioate
  modified_base 3: mod_base = OTHER; note = 2'O-methyl adenosine
  modified_base 4: mod_base = OTHER; note = 2'O-methyl guanosine
  modified_base 5: mod_base = OTHER; note = 2'O-methyl adenosine
  modified_base 6: mod_base = OTHER; note = 2'O-methyl uridine
  modified_base 7: mod_base = OTHER; note = 2'-fluoro uridine
  modified_base 8: mod_base = OTHER; note = 2'O-methyl adenosine
  modified_base 9: mod_base = OTHER; note = 2'-fluoro cytidine
  modified_base 10: mod_base = OTHER; note = 2'-fluoro cytidine
  modified_base 11: mod_base = OTHER; note = 2'-fluoro adenosine
  modified_base 12: mod_base = OTHER; note = 2'O-methyl adenosine
  modified_base 13: mod_base = OTHER; note = 2'O-methyl guanosine
  modified_base 14: mod_base = OTHER; note = 2'O-methyl adenosine
  modified_base 15: mod_base = OTHER; note = 2'O-methyl cytidine
  modified_base 16: mod_base = OTHER; note = 2'O-methyl adenosine
  modified_base 17: mod_base = OTHER; note = 2'O-methyl uridine
  modified_base 18: mod_base = OTHER; note = 2'O-methyl uridine
  modified_base 19: mod_base = OTHER; note = 2'O-methyl uridine
  modified_base 20: mod_base = OTHER; note = 2'O-methyl guanosine phosphorothioate
  modified_base 21: mod_base = OTHER; note = 2'O-methyl adenosine
agagattaccaagacatttga

SEQ ID NO: 340 - RNA, 21 nt, synthetic construct
  source 1..21: mol_type = other RNA
  modified_base 1: mod_base = OTHER; note = 2'O-methyl guanosine phosphorothioate
  modified_base 2: mod_base = OTHER; note = 2'O-methyl adenosine phosphorothioate
  modified_base 3: mod_base = OTHER; note = 2'O-methyl uridine
  modified_base 4: mod_base = OTHER; note = 2'O-methyl uridine
  modified_base 5: mod_base = OTHER; note = 2'O-methyl adenosine
  modified_base 6: mod_base = OTHER; note = 2'O-methyl cytidine
  modified_base 7: mod_base = OTHER; note = 2'-fluoro cytidine
  modified_base 8: mod_base = OTHER; note = 2'O-methyl adenosine
  modified_base 9: mod_base = OTHER; note = 2'-fluoro adenosine
  modified_base 10: mod_base = OTHER; note = 2'-fluoro guanosine
  modified_base 11: mod_base = OTHER; note = 2'-fluoro adenosine
  modified_base 12: mod_base = OTHER; note = 2'O-methyl cytidine
  modified_base 13: mod_base = OTHER; note = 2'O-methyl adenosine
  modified_base 14: mod_base = OTHER; note = 2'O-methyl uridine
  modified_base 15: mod_base = OTHER; note = 2'O-methyl uridine
  modified_base 16: mod_base = OTHER; note = 2'O-methyl uridine
  modified_base 17: mod_base = OTHER; note = 2'O-methyl guanosine
  modified_base 18: mod_base = OTHER; note = 2'O-methyl adenosine
  modified_base 19: mod_base = OTHER; note = 2'O-methyl guanosine
  modified_base 20: mod_base = OTHER; note = 2'O-methyl guanosine phosphorothioate
  modified_base 21: mod_base = OTHER; note = 2'O-methyl uridine
gattaccaagacatttgaggt

SEQ ID NO: 341 - RNA, 21 nt, synthetic construct
  source 1..21: mol_type = other RNA
  modified_base 1: mod_base = OTHER; note = 2'O-methyl uridine phosphorothioate
  modified_base 2: mod_base = OTHER; note = 2'O-methyl adenosine phosphorothioate
  modified_base 3: mod_base = OTHER; note = 2'O-methyl cytidine
  modified_base 4: mod_base = OTHER; note = 2'O-methyl cytidine
  modified_base 5: mod_base = OTHER; note = 2'O-methyl adenosine
  modified_base 6: mod_base = OTHER; note = 2'O-methyl adenosine
  modified_base 7: mod_base = OTHER; note = 2'-fluoro guanosine
  modified_base 8: mod_base = OTHER; note = 2'O-methyl adenosine
  modified_base 9: mod_base = OTHER; note = 2'-fluoro cytidine
  modified_base 10: mod_base = OTHER; note = 2'-fluoro adenosine
  modified_base 11: mod_base = OTHER; note = 2'-fluoro uridine
  modified_base 12: mod_base = OTHER; note = 2'O-methyl uridine
  modified_base 13: mod_base = OTHER; note = 2'O-methyl uridine
  modified_base 14: mod_base = OTHER; note = 2'O-methyl guanosine
  modified_base 15: mod_base = OTHER; note = 2'O-methyl adenosine
  modified_base 16: mod_base = OTHER; note = 2'O-methyl guanosine
  modified_base 17: mod_base = OTHER; note = 2'O-methyl guanosine
  modified_base 18: mod_base = OTHER; note = 2'O-methyl uridine
  modified_base 19: mod_base = OTHER; note = 2'O-methyl cytidine
  modified_base 20: mod_base = OTHER; note = 2'O-methyl adenosine phosphorothioate
  modified_base 21: mod_base = OTHER; note = 2'O-methyl adenosine
taccaagacatttgaggtcaa

SEQ ID NO: 342 - RNA, 21 nt, synthetic construct
  source 1..21: mol_type = other RNA
  modified_base 1: mod_base = OTHER; note = 2'O-methyl cytidine phosphorothioate
  modified_base 2: mod_base = OTHER; note = 2'O-methyl cytidine phosphorothioate
  modified_base 3: mod_base = OTHER; note = 2'O-methyl adenosine
  modified_base 4: mod_base = OTHER; note = 2'O-methyl adenosine
  modified_base 5: mod_base = OTHER; note = 2'O-methyl guanosine
  modified_base 6: mod_base = OTHER; note = 2'O-methyl adenosine
  modified_base 7: mod_base = OTHER; note = 2'-fluoro cytidine
  modified_base 8: mod_base = OTHER; note = 2'O-methyl adenosine
  modified_base 9: mod_base = OTHER; note = 2'-fluoro uridine
  modified_base 10: mod_base = OTHER; note = 2'-fluoro uridine
  modified_base 11: mod_base = OTHER; note = 2'-fluoro uridine
  modified_base 12: mod_base = OTHER; note = 2'O-methyl guanosine
  modified_base 13: mod_base = OTHER; note = 2'O-methyl adenosine
  modified_base 14: mod_base = OTHER; note = 2'O-methyl guanosine
  modified_base 15: mod_base = OTHER; note = 2'O-methyl guanosine
  modified_base 16: mod_base = OTHER; note = 2'O-methyl uridine
  modified_base 17: mod_base = OTHER; note = 2'O-methyl cytidine
  modified_base 18: mod_base = OTHER; note = 2'O-methyl adenosine
  modified_base 19: mod_base = OTHER; note = 2'O-methyl adenosine
  modified_base 20: mod_base = OTHER; note = 2'O-methyl cytidine phosphorothioate
  modified_base 21: mod_base = OTHER; note = 2'O-methyl adenosine
ccaagacatttgaggtcaaca

SEQ ID NO: 343 - RNA, 21 nt, synthetic construct
  source 1..21: mol_type = other RNA
  modified_base 1: mod_base = OTHER; note = 2'O-methyl uridine phosphorothioate
  modified_base 2: mod_base = OTHER; note = 2'O-methyl guanosine phosphorothioate
  modified_base 3: mod_base = OTHER; note = 2'O-methyl adenosine
  modified_base 4: mod_base = OTHER; note = 2'O-methyl guanosine
  modified_base 5: mod_base = OTHER; note = 2'O-methyl guanosine
  modified_base 6: mod_base = OTHER; note = 2'O-methyl uridine
  modified_base 7: mod_base = OTHER; note = 2'-fluoro cytidine
  modified_base 8: mod_base = OTHER; note = 2'O-methyl adenosine
  modified_base 9: mod_base = OTHER; note = 2'-fluoro adenosine
  modified_base 10: mod_base = OTHER; note = 2'-fluoro cytidine
  modified_base 11: mod_base = OTHER; note = 2'-fluoro adenosine
  modified_base 12: mod_base = OTHER; note = 2'O-methyl uridine
  modified_base 13: mod_base = OTHER; note = 2'O-methyl cytidine
  modified_base 14: mod_base = OTHER; note = 2'O-methyl cytidine
  modified_base 15: mod_base = OTHER; note = 2'O-methyl uridine
  modified_base 16: mod_base = OTHER; note = 2'O-methyl adenosine
  modified_base 17: mod_base = OTHER; note = 2'O-methyl guanosine
  modified_base 18: mod_base = OTHER; note = 2'O-methyl guanosine
  modified_base 19: mod_base = OTHER; note = 2'O-methyl adenosine
  modified_base 20: mod_base = OTHER; note = 2'O-methyl cytidine phosphorothioate
  modified_base 21: mod_base = OTHER; note = 2'O-methyl adenosine
tgaggtcaacatcctaggaca

SEQ ID NO: 344 - RNA, 21 nt, synthetic construct
  source 1..21: mol_type = other RNA
  modified_base 1: mod_base = OTHER; note = 2'O-methyl adenosine phosphorothioate
  modified_base 2: mod_base = OTHER; note = 2'O-methyl guanosine phosphorothioate
  modified_base 3: mod_base = OTHER; note = 2'O-methyl guanosine
  modified_base 4: mod_base = OTHER; note = 2'O-methyl uridine
  modified_base 5: mod_base = OTHER; note = 2'O-methyl cytidine
  modified_base 6: mod_base = OTHER; note = 2'O-methyl adenosine
  modified_base 7: mod_base = OTHER; note = 2'-fluoro adenosine
  modified_base 8: mod_base = OTHER; note = 2'O-methyl cytidine
  modified_base 9: mod_base = OTHER; note = 2'-fluoro adenosine
  modified_base 10: mod_base = OTHER; note = 2'-fluoro uridine
  modified_base 11: mod_base = OTHER; note = 2'-fluoro cytidine
  modified_base 12: mod_base = OTHER; note = 2'O-methyl cytidine
  modified_base 13: mod_base = OTHER; note = 2'O-methyl uridine
  modified_base 14: mod_base = OTHER; note = 2'O-methyl adenosine
  modified_base 15: mod_base = OTHER; note = 2'O-methyl guanosine
  modified_base 16: mod_base = OTHER; note = 2'O-methyl guanosine
  modified_base 17: mod_base = OTHER; note = 2'O-methyl adenosine
  modified_base 18: mod_base = OTHER; note = 2'O-methyl cytidine
  modified_base 19: mod_base = OTHER; note = 2'O-methyl adenosine
  modified_base 20: mod_base = OTHER; note = 2'O-methyl uridine phosphorothioate
  modified_base 21: mod_base = OTHER; note = 2'O-methyl uridine
aggtcaacatcctaggacatt

SEQ ID NO: 345 - RNA, 21 nt, synthetic construct
  source 1..21: mol_type = other RNA
  modified_base 1: mod_base = OTHER; note = 2'O-methyl guanosine phosphorothioate
  modified_base 2: mod_base = OTHER; note = 2'O-methyl uridine phosphorothioate
  modified_base 3: mod_base = OTHER; note = 2'O-methyl cytidine
  modified_base 4: mod_base = OTHER; note = 2'O-methyl adenosine
  modified_base 5: mod_base = OTHER; note = 2'O-methyl adenosine
  modified_base 6: mod_base = OTHER; note = 2'O-methyl cytidine
  modified_base 7: mod_base = OTHER; note = 2'-fluoro adenosine
  modified_base 8: mod_base = OTHER; note = 2'O-methyl uridine
  modified_base 9: mod_base = OTHER; note = 2'-fluoro cytidine
  modified_base 10: mod_base = OTHER; note = 2'-fluoro cytidine
  modified_base 11: mod_base = OTHER; note = 2'-fluoro uridine
  modified_base 12: mod_base = OTHER; note = 2'O-methyl adenosine
  modified_base 13: mod_base = OTHER; note = 2'O-methyl guanosine
  modified_base 14: mod_base = OTHER; note = 2'O-methyl guanosine
  modified_base 15: mod_base = OTHER; note = 2'O-methyl adenosine
  modified_base 16: mod_base = OTHER; note = 2'O-methyl cytidine
  modified_base 17: mod_base = OTHER; note = 2'O-methyl adenosine
  modified_base 18: mod_base = OTHER; note = 2'O-methyl uridine
  modified_base 19: mod_base = OTHER; note = 2'O-methyl uridine
  modified_base 20: mod_base = OTHER; note = 2'O-methyl uridine phosphorothioate
  modified_base 21: mod_base = OTHER; note = 2'O-methyl uridine
gtcaacatcctaggacatttt

SEQ ID NO: 346 - RNA, 21 nt, synthetic construct
  source 1..21: mol_type = other RNA
  modified_base 1: mod_base = OTHER; note = 2'O-methyl uridine phosphorothioate
  modified_base 2: mod_base = OTHER; note = 2'O-methyl cytidine phosphorothioate
  modified_base 3: mod_base = OTHER; note = 2'O-methyl adenosine
  modified_base 4: mod_base = OTHER; note = 2'O-methyl adenosine
  modified_base 5: mod_base = OTHER; note = 2'O-methyl cytidine
  modified_base 6: mod_base = OTHER; note = 2'O-methyl adenosine
  modified_base 7: mod_base = OTHER; note = 2'-fluoro uridine
  modified_base 8: mod_base = OTHER; note = 2'O-methyl cytidine
  modified_base 9: mod_base = OTHER; note = 2'-fluoro cytidine
  modified_base 10: mod_base = OTHER; note = 2'-fluoro uridine
  modified_base 11: mod_base = OTHER; note = 2'-fluoro adenosine
  modified_base 12: mod_base = OTHER; note = 2'O-methyl guanosine
  modified_base 13: mod_base = OTHER; note = 2'O-methyl guanosine
  modified_base 14: mod_base = OTHER; note = 2'O-methyl adenosine
  modified_base 15: mod_base = OTHER; note = 2'O-methyl cytidine
  modified_base 16: mod_base = OTHER; note = 2'O-methyl adenosine
  modified_base 17: mod_base = OTHER; note = 2'O-methyl uridine
  modified_base 18: mod_base = OTHER; note = 2'O-methyl uridine
  modified_base 19: mod_base = OTHER; note = 2'O-methyl uridine
  modified_base 20: mod_base = OTHER; note = 2'O-methyl uridine phosphorothioate
  modified_base 21: mod_base = OTHER; note = 2'O-methyl uridine
tcaacatcctaggacattttt

SEQ ID NO: 347 - RNA, 21 nt, synthetic construct
  source 1..21: mol_type = other RNA
  modified_base 1: mod_base = OTHER; note = 2'O-methyl cytidine phosphorothioate
  modified_base 2: mod_base = OTHER; note = 2'O-methyl adenosine phosphorothioate
  modified_base 3: mod_base = OTHER; note = 2'O-methyl uridine
  modified_base 4: mod_base = OTHER; note = 2'O-methyl cytidine
  modified_base 5: mod_base = OTHER; note = 2'O-methyl cytidine
  modified_base 6: mod_base = OTHER; note = 2'O-methyl uridine
  modified_base 7: mod_base = OTHER; note = 2'-fluoro adenosine
  modified_base 8: mod_base = OTHER; note = 2'O-methyl guanosine
  modified_base 9: mod_base = OTHER; note = 2'-fluoro guanosine
  modified_base 10: mod_base = OTHER; note = 2'-fluoro adenosine
  modified_base 11: mod_base = OTHER; note = 2'-fluoro cytidine
  modified_base 12: mod_base = OTHER; note = 2'O-methyl adenosine
  modified_base 13: mod_base = OTHER; note = 2'O-methyl uridine
  modified_base 14: mod_base = OTHER; note = 2'O-methyl uridine
  modified_base 15: mod_base = OTHER; note = 2'O-methyl uridine
  modified_base 16: mod_base = OTHER; note = 2'O-methyl uridine
  modified_base 17: mod_base = OTHER; note = 2'O-methyl uridine
  modified_base 18: mod_base = OTHER; note = 2'O-methyl guanosine
  modified_base 19: mod_base = OTHER; note = 2'O-methyl guanosine
  modified_base 20: mod_base = OTHER; note = 2'O-methyl adenosine phosphorothioate
  modified_base 21: mod_base = OTHER; note = 2'O-methyl uridine
catcctaggacatttttggat

SEQ ID NO: 348 - RNA, 21 nt, synthetic construct
  source 1..21: mol_type = other RNA
  modified_base 1: mod_base = OTHER; note = 2'O-methyl uridine phosphorothioate
  modified_base 2: mod_base = OTHER; note = 2'O-methyl cytidine phosphorothioate
  modified_base 3: mod_base = OTHER; note = 2'O-methyl cytidine
  modified_base 4: mod_base = OTHER; note = 2'O-methyl uridine
  modified_base 5: mod_base = OTHER; note = 2'O-methyl adenosine
  modified_base 6: mod_base = OTHER; note = 2'O-methyl guanosine
  modified_base 7: mod_base = OTHER; note = 2'-fluoro guanosine
  modified_base 8: mod_base = OTHER; note = 2'O-methyl adenosine
  modified_base 9: mod_base = OTHER; note = 2'-fluoro cytidine
  modified_base 10: mod_base = OTHER; note = 2'-fluoro adenosine
  modified_base 11: mod_base = OTHER; note = 2'-fluoro uridine
  modified_base 12: mod_base = OTHER; note = 2'O-methyl uridine
  modified_base 13: mod_base = OTHER; note = 2'O-methyl uridine
  modified_base 14: mod_base = OTHER; note = 2'O-methyl uridine
  modified_base 15: mod_base = OTHER; note = 2'O-methyl uridine
  modified_base 16: mod_base = OTHER; note = 2'O-methyl guanosine
  modified_base 17: mod_base = OTHER; note = 2'O-methyl guanosine
  modified_base 18: mod_base = OTHER; note = 2'O-methyl adenosine
  modified_base 19: mod_base = OTHER; note = 2'O-methyl uridine
  modified_base 20: mod_base = OTHER; note = 2'O-methyl cytidine phosphorothioate
  modified_base 21: mod_base = OTHER; note = 2'O-methyl adenosine
tcctaggacatttttggatca

SEQ ID NO: 349 - RNA, 21 nt, synthetic construct
  source 1..21: mol_type = other RNA
  modified_base 1: mod_base = OTHER; note = 2'O-methyl adenosine phosphorothioate
  modified_base 2: mod_base = OTHER; note = 2'O-methyl guanosine phosphorothioate
  modified_base 3: mod_base = OTHER; note = 2'O-methyl guanosine
  modified_base 4: mod_base = OTHER; note = 2'O-methyl adenosine
  modified_base 5: mod_base = OTHER; note = 2'O-methyl cytidine
  modified_base 6: mod_base = OTHER; note = 2'O-methyl adenosine
  modified_base 7: mod_base = OTHER; note = 2'-fluoro uridine
  modified_base 8: mod_base = OTHER; note = 2'O-methyl uridine
  modified_base 9: mod_base = OTHER; note = 2'-fluoro uridine
  modified_base 10: mod_base = OTHER; note = 2'-fluoro uridine
  modified_base 11: mod_base = OTHER; note = 2'-fluoro uridine
  modified_base 12: mod_base = OTHER; note = 2'O-methyl guanosine
  modified_base 13: mod_base = OTHER; note = 2'O-methyl guanosine
  modified_base 14: mod_base = OTHER; note = 2'O-methyl adenosine
  modified_base 15: mod_base = OTHER; note = 2'O-methyl uridine
  modified_base 16: mod_base = OTHER; note = 2'O-methyl cytidine
  modified_base 17: mod_base = OTHER; note = 2'O-methyl adenosine
  modified_base 18: mod_base = OTHER; note = 2'O-methyl cytidine
  modified_base 19: mod_base = OTHER; note = 2'O-methyl adenosine
  modified_base 20: mod_base = OTHER; note = 2'O-methyl adenosine phosphorothioate
  modified_base 21: mod_base = OTHER; note = 2'O-methyl adenosine
aggacatttttggatcacaaa

SEQ ID NO: 350 - RNA, 21 nt, synthetic construct
  source 1..21: mol_type = other RNA
  modified_base 1: mod_base = OTHER; note = 2'O-methyl guanosine phosphorothioate
  modified_base 2: mod_base = OTHER; note = 2'O-methyl guanosine phosphorothioate
  modified_base 3: mod_base = OTHER; note = 2'O-methyl adenosine
  modified_base 4: mod_base = OTHER; note = 2'O-methyl cytidine
  modified_base 5: mod_base = OTHER; note = 2'O-methyl adenosine
  modified_base 6: mod_base = OTHER; note = 2'O-methyl uridine
  modified_base 7: mod_base = OTHER; note = 2'-fluoro uridine
  modified_base 8: mod_base = OTHER; note = 2'O-methyl uridine
  modified_base 9: mod_base = OTHER; note = 2'-fluoro uridine
  modified_base 10: mod_base = OTHER; note = 2'-fluoro uridine
  modified_base 11: mod_base = OTHER; note = 2'-fluoro guanosine
  modified_base 12: mod_base = OTHER; note = 2'O-methyl guanosine
  modified_base 13: mod_base = OTHER; note = 2'O-methyl adenosine
  modified_base 14: mod_base = OTHER; note = 2'O-methyl uridine
  modified_base 15: mod_base = OTHER; note = 2'O-methyl cytidine
  modified_base 16: mod_base = OTHER; note = 2'O-methyl adenosine
  modified_base 17: mod_base = OTHER; note = 2'O-methyl cytidine
  modified_base 18: mod_base = OTHER; note = 2'O-methyl adenosine
  modified_base 19: mod_base = OTHER; note = 2'O-methyl adenosine
  modified_base 20: mod_base = OTHER; note = 2'O-methyl adenosine phosphorothioate
  modified_base 21: mod_base = OTHER; note = 2'O-methyl adenosine
ggacatttttggatcacaaaa

SEQ ID NO: 351 - RNA, 21 nt, synthetic construct
  source 1..21: mol_type = other RNA
  modified_base 1: mod_base = OTHER; note = 2'O-methyl uridine phosphorothioate
  modified_base 2: mod_base = OTHER; note = 2'O-methyl uridine phosphorothioate
  modified_base 3: mod_base = OTHER; note = 2'O-methyl uridine
  modified_base 4: mod_base = OTHER; note = 2'O-methyl uridine
  modified_base 5: mod_base = OTHER; note = 2'O-methyl uridine
  modified_base 6: mod_base = OTHER; note = 2'O-methyl guanosine
  modified_base 7: mod_base = OTHER; note = 2'-fluoro guanosine
  modified_base 8: mod_base = OTHER; note = 2'O-methyl adenosine
  modified_base 9: mod_base = OTHER; note = 2'-fluoro uridine
  modified_base 10: mod_base = OTHER; note = 2'-fluoro cytidine
  modified_base 11: mod_base = OTHER; note = 2'-fluoro adenosine
  modified_base 12: mod_base = OTHER; note = 2'O-methyl cytidine
  modified_base 13: mod_base = OTHER; note = 2'O-methyl adenosine
  modified_base 14: mod_base = OTHER; note = 2'O-methyl adenosine
  modified_base 15: mod_base = OTHER; note = 2'O-methyl adenosine
  modified_base 16: mod_base = OTHER; note = 2'O-methyl adenosine
  modified_base 17: mod_base = OTHER; note = 2'O-methyl guanosine
  modified_base 18: mod_base = OTHER; note = 2'O-methyl cytidine
  modified_base 19: mod_base = OTHER; note = 2'O-methyl adenosine
  modified_base 20: mod_base = OTHER; note = 2'O-methyl cytidine phosphorothioate
  modified_base 21: mod_base = OTHER; note = 2'O-methyl uridine
tttttggatcacaaaagcact

SEQ ID NO: 352 - RNA, 21 nt, synthetic construct
  source 1..21: mol_type = other RNA
  modified_base 1: mod_base = OTHER; note = 2'O-methyl uridine phosphorothioate
  modified_base 2: mod_base = OTHER; note = 2'O-methyl uridine phosphorothioate
  modified_base 3: mod_base = OTHER; note = 2'O-methyl guanosine
  modified_base 4: mod_base = OTHER; note = 2'O-methyl guanosine
  modified_base 5: mod_base = OTHER; note = 2'O-methyl adenosine
  modified_base 6: mod_base = OTHER; note = 2'O-methyl uridine
  modified_base 7: mod_base = OTHER; note = 2'-fluoro cytidine
  modified_base 8: mod_base = OTHER; note = 2'O-methyl adenosine
  modified_base 9: mod_base = OTHER; note = 2'-fluoro cytidine
  modified_base 10: mod_base = OTHER; note = 2'-fluoro adenosine
  modified_base 11: mod_base = OTHER; note = 2'-fluoro adenosine
  modified_base 12: mod_base = OTHER; note = 2'O-methyl adenosine
  modified_base 13: mod_base = OTHER; note = 2'O-methyl adenosine
  modified_base 14: mod_base = OTHER; note = 2'O-methyl guanosine
  modified_base 15: mod_base = OTHER; note = 2'O-methyl cytidine
  modified_base 16: mod_base = OTHER; note = 2'O-methyl adenosine
  modified_base 17: mod_base = OTHER; note = 2'O-methyl cytidine
  modified_base 18: mod_base = OTHER; note = 2'O-methyl uridine
  modified_base 19: mod_base = OTHER; note = 2'O-methyl uridine
  modified_base 20: mod_base = OTHER; note = 2'O-methyl cytidine phosphorothioate
  modified_base 21: mod_base = OTHER; note = 2'O-methyl uridine
ttggatcacaaaagcacttct

SEQ ID NO: 353 - RNA, 21 nt, synthetic construct
  source 1..21: mol_type = other RNA
  modified_base 1: mod_base = OTHER; note = 2'O-methyl adenosine phosphorothioate
  modified_base 2: mod_base = OTHER; note = 2'O-methyl uridine phosphorothioate
  modified_base 3: mod_base = OTHER; note = 2'O-methyl cytidine
  modified_base 4: mod_base = OTHER; note = 2'O-methyl adenosine
  modified_base 5: mod_base = OTHER; note = 2'O-methyl cytidine
  modified_base 6: mod_base = OTHER; note = 2'O-methyl adenosine
  modified_base 7: mod_base = OTHER; note = 2'-fluoro adenosine
  modified_base 8: mod_base = OTHER; note = 2'O-methyl adenosine
  modified_base 9: mod_base = OTHER; note = 2'-fluoro adenosine
  modified_base 10: mod_base = OTHER; note = 2'-fluoro guanosine
  modified_base 11: mod_base = OTHER; note = 2'-fluoro cytidine
  modified_base 12: mod_base = OTHER; note = 2'O-methyl adenosine
  modified_base 13: mod_base = OTHER; note = 2'O-methyl cytidine
  modified_base 14: mod_base = OTHER; note = 2'O-methyl uridine
  modified_base 15: mod_base = OTHER; note = 2'O-methyl uridine
  modified_base 16: mod_base = OTHER; note = 2'O-methyl cytidine
  modified_base 17: mod_base = OTHER; note = 2'O-methyl uridine
  modified_base 18: mod_base = OTHER; note = 2'O-methyl uridine
  modified_base 19: mod_base = OTHER; note = 2'O-methyl cytidine
  modified_base 20: mod_base = OTHER; note = 2'O-methyl cytidine phosphorothioate
  modified_base 21: mod_base = OTHER; note = 2'O-methyl adenosine
atcacaaaagcacttcttcca

SEQ ID NO: 354 - RNA, 21 nt, synthetic construct
  source 1..21: mol_type = other RNA
  modified_base 1: mod_base = OTHER; note = 2'O-methyl uridine phosphorothioate
  modified_base 2: mod_base = OTHER; note = 2'O-methyl cytidine phosphorothioate
  modified_base 3: mod_base = OTHER; note = 2'O-methyl adenosine
  modified_base 4: mod_base = OTHER; note = 2'O-methyl cytidine
  modified_base 5: mod_base = OTHER; note = 2'O-methyl adenosine
  modified_base 6: mod_base = OTHER; note = 2'O-methyl adenosine
  modified_base 7: mod_base = OTHER; note = 2'-fluoro adenosine
  modified_base 8: mod_base = OTHER; note = 2'O-methyl adenosine
  modified_base 9: mod_base = OTHER; note = 2'-fluoro guanosine
  modified_base 10: mod_base = OTHER; note = 2'-fluoro cytidine
  modified_base 11: mod_base = OTHER; note = 2'-fluoro adenosine
  modified_base 12: mod_base = OTHER; note = 2'O-methyl cytidine
  modified_base 13: mod_base = OTHER; note = 2'O-methyl uridine
  modified_base 14: mod_base = OTHER; note = 2'O-methyl uridine
  modified_base 15: mod_base = OTHER; note = 2'O-methyl cytidine
  modified_base 16: mod_base = OTHER; note = 2'O-methyl uridine
  modified_base 17: mod_base = OTHER; note = 2'O-methyl uridine
  modified_base 18: mod_base = OTHER; note = 2'O-methyl cytidine
  modified_base 19: mod_base = OTHER; note = 2'O-methyl cytidine
  modified_base 20: mod_base = OTHER; note = 2'O-methyl adenosine phosphorothioate
  modified_base 21: mod_base = OTHER; note = 2'O-methyl uridine
tcacaaaagcacttcttccat

SEQ ID NO: 355 - RNA, 21 nt, synthetic construct
  source 1..21: mol_type = other RNA
  modified_base 1: mod_base = OTHER; note = 2'O-methyl adenosine phosphorothioate
  modified_base 2: mod_base = OTHER; note = 2'O-methyl adenosine phosphorothioate
  modified_base 3: mod_base = OTHER; note = 2'O-methyl guanosine
  modified_base 4: mod_base = OTHER; note = 2'O-methyl cytidine
  modified_base 5: mod_base = OTHER; note = 2'O-methyl adenosine
  modified_base 6: mod_base = OTHER; note = 2'O-methyl cytidine
  modified_base 7: mod_base = OTHER; note = 2'-fluoro uridine
  modified_base 8: mod_base = OTHER; note = 2'O-methyl uridine
  modified_base 9: mod_base = OTHER; note = 2'-fluoro cytidine
  modified_base 10: mod_base = OTHER; note = 2'-fluoro uridine
  modified_base 11: mod_base = OTHER; note = 2'-fluoro uridine
  modified_base 12: mod_base = OTHER; note = 2'O-methyl cytidine
  modified_base 13: mod_base = OTHER; note = 2'O-methyl cytidine
  modified_base 14: mod_base = OTHER; note = 2'O-methyl adenosine
  modified_base 15: mod_base = OTHER; note = 2'O-methyl uridine
  modified_base 16: mod_base = OTHER; note = 2'O-methyl cytidine
  modified_base 17: mod_base = OTHER; note = 2'O-methyl guanosine
  modified_base 18: mod_base = OTHER; note = 2'O-methyl adenosine
  modified_base 19: mod_base = OTHER; note = 2'O-methyl uridine
  modified_base 20: mod_base = OTHER; note = 2'O-methyl guanosine phosphorothioate
  modified_base 21: mod_base = OTHER; note = 2'O-methyl adenosine
aagcacttcttccatcgatga

SEQ ID NO: 356 - RNA, 21 nt, synthetic construct
  source 1..21: mol_type = other RNA
  modified_base 1: mod_base = OTHER; note = 2'O-methyl adenosine phosphorothioate
  modified_base 2: mod_base = OTHER; note = 2'O-methyl guanosine phosphorothioate
  modified_base 3: mod_base = OTHER; note = 2'O-methyl cytidine
  modified_base 4: mod_base = OTHER; note = 2'O-methyl adenosine
  modified_base 5: mod_base = OTHER; note = 2'O-methyl cytidine
  modified_base 6: mod_base = OTHER; note = 2'O-methyl uridine
  modified_base 7: mod_base = OTHER; note = 2'-fluoro uridine
  modified_base 8: mod_base = OTHER; note = 2'O-methyl cytidine
  modified_base 9: mod_base = OTHER; note = 2'-fluoro uridine
  modified_base 10: mod_base = OTHER; note = 2'-fluoro uridine
  modified_base 11: mod_base = OTHER; note = 2'-fluoro cytidine
  modified_base 12: mod_base = OTHER; note = 2'O-methyl cytidine
  modified_base 13: mod_base = OTHER; note = 2'O-methyl adenosine
  modified_base 14: mod_base = OTHER; note = 2'O-methyl uridine
  modified_base 15: mod_base = OTHER; note = 2'O-methyl cytidine
  modified_base 16: mod_base = OTHER; note = 2'O-methyl guanosine
  modified_base 17: mod_base = OTHER; note = 2'O-methyl adenosine
  modified_base 18: mod_base = OTHER; note = 2'O-methyl uridine
  modified_base 19: mod_base = OTHER; note = 2'O-methyl guanosine
  modified_base 20: mod_base = OTHER; note = 2'O-methyl adenosine phosphorothioate
  modified_base 21: mod_base = OTHER; note = 2'O-methyl uridine
agcacttcttccatcgatgat

SEQ ID NO: 357 - RNA, 21 nt, synthetic construct
  source 1..21: mol_type = other RNA
  modified_base 1: mod_base = OTHER; note = 2'O-methyl uridine phosphorothioate
  modified_base 2: mod_base = OTHER; note = 2'O-methyl uridine phosphorothioate
  modified_base 3: mod_base = OTHER; note = 2'O-methyl cytidine
  modified_base 4: mod_base = OTHER; note = 2'O-methyl cytidine
  modified_base 5: mod_base = OTHER; note = 2'O-methyl adenosine
  modified_base 6: mod_base = OTHER; note = 2'O-methyl uridine
  modified_base 7: mod_base = OTHER; note = 2'-fluoro cytidine
  modified_base 8: mod_base = OTHER; note = 2'O-methyl guanosine
  modified_base 9: mod_base = OTHER; note = 2'-fluoro adenosine
  modified_base 10: mod_base = OTHER; note = 2'-fluoro uridine
  modified_base 11: mod_base = OTHER; note = 2'-fluoro guanosine
  modified_base 12: mod_base = OTHER; note = 2'O-methyl adenosine
  modified_base 13: mod_base = OTHER; note = 2'O-methyl uridine
  modified_base 14: mod_base = OTHER; note = 2'O-methyl guanosine
  modified_base 15: mod_base = OTHER; note = 2'O-methyl guanosine
  modified_base 16: mod_base = OTHER; note = 2'O-methyl adenosine
  modified_base 17: mod_base = OTHER; note = 2'O-methyl guanosine
  modified_base 18: mod_base = OTHER; note = 2'O-methyl adenosine
  modified_base 19: mod_base = OTHER; note = 2'O-methyl guanosine
  modified_base 20: mod_base = OTHER; note = 2'O-methyl adenosine phosphorothioate
  modified_base 21: mod_base = OTHER; note = 2'O-methyl adenosine
ttccatcgatgatggagagaa

SEQ ID NO: 358 - RNA, 21 nt, synthetic construct
  source 1..21: mol_type = other RNA
  modified_base 1: mod_base = OTHER; note = 2'O-methyl cytidine phosphorothioate
  modified_base 2: mod_base = OTHER; note = 2'O-methyl adenosine phosphorothioate
  modified_base 3: mod_base = OTHER; note = 2'O-methyl uridine
  modified_base 4: mod_base = OTHER; note = 2'O-methyl cytidine
  modified_base 5: mod_base = OTHER; note = 2'O-methyl guanosine
  modified_base 6: mod_base = OTHER; note = 2'O-methyl uridine
  modified_base 7: mod_base = OTHER; note = 2'-fluoro cytidine
  modified_base 8: mod_base = OTHER; note = 2'O-methyl adenosine
  modified_base 9: mod_base = OTHER; note = 2'-fluoro cytidine
  modified_base 10: mod_base = OTHER; note = 2'-fluoro adenosine
  modified_base 11: mod_base = OTHER; note = 2'-fluoro guanosine
  modified_base 12: mod_base = OTHER; note = 2'O-methyl uridine
  modified_base 13: mod_base = OTHER; note = 2'O-methyl guanosine
  modified_base 14: mod_base = OTHER; note = 2'O-methyl guanosine
  modified_base 15: mod_base = OTHER; note = 2'O-methyl cytidine
  modified_base 16: mod_base = OTHER; note = 2'O-methyl uridine
  modified_base 17: mod_base = OTHER; note = 2'O-methyl uridine
  modified_base 18: mod_base = OTHER; note = 2'O-methyl cytidine
  modified_base 19: mod_base = OTHER; note = 2'O-methyl adenosine
  modified_base 20: mod_base = OTHER; note = 2'O-methyl guanosine phosphorothioate
  modified_base 21: mod_base = OTHER; note = 2'O-methyl uridine
catcgtcacagtggcttcagt

SEQ ID NO: 359 - RNA, 21 nt, synthetic construct
  source 1..21: mol_type = other RNA
  modified_base 1: mod_base = OTHER; note = 2'O-methyl uridine phosphorothioate
  modified_base 2: mod_base = OTHER; note = 2'O-methyl cytidine phosphorothioate
  modified_base 3: mod_base = OTHER; note = 2'O-methyl guanosine
  modified_base 4: mod_base = OTHER; note = 2'O-methyl uridine
  modified_base 5: mod_base = OTHER; note = 2'O-methyl cytidine
  modified_base 6: mod_base = OTHER; note = 2'O-methyl adenosine
  modified_base 7: mod_base = OTHER; note = 2'-fluoro cytidine
  modified_base 8: mod_base = OTHER; note = 2'O-methyl adenosine
  modified_base 9: mod_base = OTHER; note = 2'-fluoro guanosine
  modified_base 10: mod_base = OTHER; note = 2'-fluoro uridine
  modified_base 11: mod_base = OTHER; note = 2'-fluoro guanosine
  modified_base 12: mod_base = OTHER; note = 2'O-methyl guanosine
  modified_base 13: mod_base = OTHER; note = 2'O-methyl cytidine
  modified_base 14: mod_base = OTHER; note = 2'O-methyl uridine
  modified_base 15: mod_base = OTHER; note = 2'O-methyl uridine
  modified_base 16: mod_base = OTHER; note = 2'O-methyl cytidine
  modified_base 17: mod_base = OTHER; note = 2'O-methyl adenosine
  modified_base 18: mod_base = OTHER; note = 2'O-methyl guanosine
  modified_base 19: mod_base = OTHER; note = 2'O-methyl uridine
  modified_base 20: mod_base = OTHER; note = 2'O-methyl guanosine phosphorothioate
  modified_base 21: mod_base = OTHER; note = 2'O-methyl uridine
tcgtcacagtggcttcagtgt

SEQ ID NO: 360 - RNA, 21 nt, synthetic construct
  source 1..21: mol_type = other RNA
  modified_base 1: mod_base = OTHER; note = 2'O-methyl guanosine phosphorothioate
  modified_base 2: mod_base = OTHER; note = 2'O-methyl adenosine phosphorothioate
  modified_base 3: mod_base = OTHER; note = 2'O-methyl uridine
  modified_base 4: mod_base = OTHER; note = 2'O-methyl uridine
  modified_base 5: mod_base = OTHER; note = 2'O-methyl cytidine
  modified_base 6: mod_base = OTHER; note = 2'O-methyl cytidine
  modified_base 7: mod_base = OTHER; note = 2'-fluoro uridine
  modified_base 8: mod_base = OTHER; note = 2'O-methyl uridine
  modified_base 9: mod_base = OTHER; note = 2'-fluoro adenosine
  modified_base 10: mod_base = OTHER; note = 2'-fluoro cytidine
  modified_base 11: mod_base = OTHER; note = 2'-fluoro cytidine
  modified_base 12: mod_base = OTHER; note = 2'O-methyl uridine
  modified_base 13: mod_base = OTHER; note = 2'O-methyl cytidine
  modified_base 14: mod_base = OTHER; note = 2'O-methyl adenosine
  modified_base 15: mod_base = OTHER; note = 2'O-methyl uridine
  modified_base 16: mod_base = OTHER; note = 2'O-methyl cytidine
  modified_base 17: mod_base = OTHER; note = 2'O-methyl cytidine
  modified_base 18: mod_base = OTHER; note = 2'O-methyl cytidine
  modified_base 19: mod_base = OTHER; note = 2'O-methyl adenosine
  modified_base 20: mod_base = OTHER; note = 2'O-methyl uridine phosphorothioate
  modified_base 21: mod_base = OTHER; note = 2'O-methyl adenosine
gattccttacctcatcccata

SEQ ID NO: 361 - RNA, 21 nt, synthetic construct
  source 1..21: mol_type = other RNA
  modified_base 1: mod_base = OTHER; note = 2'O-methyl adenosine phosphorothioate
  modified_base 2: mod_base = OTHER; note = 2'O-methyl uridine phosphorothioate
  modified_base 3: mod_base = OTHER; note = 2'O-methyl uridine
  modified_base 4: mod_base = OTHER; note = 2'O-methyl cytidine
  modified_base 5: mod_base = OTHER; note = 2'O-methyl cytidine
  modified_base 6: mod_base = OTHER; note = 2'O-methyl uridine
  modified_base 7: mod_base = OTHER; note = 2'-fluoro uridine
  modified_base 8: mod_base = OTHER; note = 2'O-methyl adenosine
  modified_base 9: mod_base = OTHER; note = 2'-fluoro cytidine
  modified_base 10: mod_base = OTHER; note = 2'-fluoro cytidine
  modified_base 11: mod_base = OTHER; note = 2'-fluoro uridine
  modified_base 12: mod_base = OTHER; note = 2'O-methyl cytidine
  modified_base 13: mod_base = OTHER; note = 2'O-methyl adenosine
  modified_base 14: mod_base = OTHER; note = 2'O-methyl uridine
  modified_base 15: mod_base = OTHER; note = 2'O-methyl cytidine
  modified_base 16: mod_base = OTHER; note = 2'O-methyl cytidine
  modified_base 17: mod_base = OTHER; note = 2'O-methyl cytidine
  modified_base 18: mod_base = OTHER; note = 2'O-methyl adenosine
  modified_base 19: mod_base = OTHER; note = 2'O-methyl uridine
  modified_base 20: mod_base = OTHER; note = 2'O-methyl adenosine phosphorothioate
  modified_base 21: mod_base = OTHER; note = 2'O-methyl uridine
attccttacctcatcccatat

SEQ ID NO: 362 - RNA, 21 nt, synthetic construct
  source 1..21: mol_type = other RNA
  modified_base 1: mod_base = OTHER; note = 2'O-methyl uridine phosphorothioate
  modified_base 2: mod_base = OTHER; note = 2'O-methyl uridine phosphorothioate
  modified_base 3: mod_base = OTHER; note = 2'O-methyl cytidine
  modified_base 4: mod_base = OTHER; note = 2'O-methyl cytidine
  modified_base 5: mod_base = OTHER; note = 2'O-methyl uridine
  modified_base 6: mod_base = OTHER; note = 2'O-methyl uridine
  modified_base 7: mod_base = OTHER; note = 2'-fluoro adenosine
  modified_base 8: mod_base = OTHER; note = 2'O-methyl cytidine
  modified_base 9: mod_base = OTHER; note = 2'-fluoro cytidine
  modified_base 10: mod_base = OTHER; note = 2'-fluoro uridine
  modified_base 11: mod_base = OTHER; note = 2'-fluoro cytidine
  modified_base 12: mod_base = OTHER; note = 2'O-methyl adenosine
  modified_base 13: mod_base = OTHER; note = 2'O-methyl uridine
  modified_base 14: mod_base = OTHER; note = 2'O-methyl cytidine
  modified_base 15: mod_base = OTHER; note = 2'O-methyl cytidine
  modified_base 16: mod_base = OTHER; note = 2'O-methyl cytidine
  modified_base 17: mod_base = OTHER; note = 2'O-methyl adenosine
  modified_base 18: mod_base = OTHER; note = 2'O-methyl uridine
  modified_base 19: mod_base = OTHER; note = 2'O-methyl adenosine
  modified_base 20: mod_base = OTHER; note = 2'O-methyl uridine phosphorothioate
  modified_base 21: mod_base = OTHER; note = 2'O-methyl uridine
ttccttacctcatcccatatt

SEQ ID NO: 363 - RNA, 21 nt, synthetic construct
  source 1..21: mol_type = other RNA
  modified_base 1: mod_base = OTHER; note = 2'O-methyl adenosine phosphorothioate
  modified_base 2: mod_base = OTHER; note = 2'O-methyl uridine phosphorothioate
  modified_base 3: mod_base = OTHER; note = 2'O-methyl cytidine
  modified_base 4: mod_base = OTHER; note = 2'O-methyl cytidine
  modified_base 5: mod_base = OTHER; note = 2'O-methyl cytidine
  modified_base 6: mod_base = OTHER; note = 2'O-methyl adenosine
  modified_base 7: mod_base = OTHER; note = 2'-fluoro uridine
  modified_base 8: mod_base = OTHER; note = 2'O-methyl adenosine
  modified_base 9: mod_base = OTHER; note = 2'-fluoro uridine
  modified_base 10: mod_base = OTHER; note = 2'-fluoro uridine
  modified_base 11: mod_base = OTHER; note = 2'-fluoro guanosine
  modified_base 12: mod_base = OTHER; note = 2'O-methyl uridine
  modified_base 13: mod_base = OTHER; note = 2'O-methyl uridine
  modified_base 14: mod_base = OTHER; note = 2'O-methyl cytidine
  modified_base 15: mod_base = OTHER; note = 2'O-methyl cytidine
  modified_base 16: mod_base = OTHER; note = 2'O-methyl adenosine
  modified_base 17: mod_base = OTHER; note = 2'O-methyl guanosine
  modified_base 18: mod_base = OTHER; note = 2'O-methyl cytidine
  modified_base 19: mod_base = OTHER; note = 2'O-methyl adenosine
  modified_base 20: mod_base = OTHER; note = 2'O-methyl adenosine phosphorothioate
  modified_base 21: mod_base = OTHER; note = 2'O-methyl adenosine
atcccatattgttccagcaaa

SEQ ID NO: 364 - RNA, 21 nt, synthetic construct
  source 1..21: mol_type = other RNA
  modified_base 1: mod_base = OTHER; note = 2'O-methyl uridine phosphorothioate
  modified_base 2: mod_base = OTHER; note = 2'O-methyl cytidine phosphorothioate
  modified_base 3: mod_base = OTHER; note = 2'O-methyl cytidine
  modified_base 4: mod_base = OTHER; note = 2'O-methyl cytidine
  modified_base 5: mod_base = OTHER; note = 2'O-methyl adenosine
  modified_base 6: mod_base = OTHER; note = 2'O-methyl uridine
  modified_base 7: mod_base = OTHER; note = 2'-fluoro adenosine
  modified_base 8: mod_base = OTHER; note = 2'O-methyl uridine
  modified_base 9: mod_base = OTHER; note = 2'-fluoro uridine
  modified_base 10: mod_base = OTHER; note = 2'-fluoro guanosine
  modified_base 11: mod_base = OTHER; note = 2'-fluoro uridine
  modified_base 12: mod_base = OTHER; note = 2'O-methyl uridine
  modified_base 13: mod_base = OTHER; note = 2'O-methyl cytidine
  modified_base 14: mod_base = OTHER; note = 2'O-methyl cytidine
  modified_base 15: mod_base = OTHER; note = 2'O-methyl adenosine
  modified_base 16: mod_base = OTHER; note = 2'O-methyl guanosine
  modified_base 17: mod_base = OTHER; note = 2'O-methyl cytidine
  modified_base 18: mod_base = OTHER; note = 2'O-methyl adenosine
  modified_base 19: mod_base = OTHER; note = 2'O-methyl adenosine
  modified_base 20: mod_base = OTHER; note = 2'O-methyl adenosine phosphorothioate
  modified_base 21: mod_base = OTHER; note = 2'O-methyl uridine
tcccatattgttccagcaaat

SEQ ID NO: 365 - RNA, 21 nt, synthetic construct
  source 1..21: mol_type = other RNA
  modified_base 1: mod_base = OTHER; note = 2'O-methyl uridine phosphorothioate
  modified_base 2: mod_base = OTHER; note = 2'O-methyl uridine phosphorothioate
  modified_base 3: mod_base = OTHER; note = 2'O-methyl guanosine
  modified_base 4: mod_base = OTHER; note = 2'O-methyl guanosine
  modified_base 5: mod_base = OTHER; note = 2'O-methyl guanosine
  modified_base 6: mod_base = OTHER; note = 2'O-methyl adenosine
  modified_base 7: mod_base = OTHER; note = 2'-fluoro adenosine
  modified_base 8: mod_base = OTHER; note = 2'O-methyl adenosine
  modified_base 9: mod_base = OTHER; note = 2'-fluoro adenosine
  modified_base 10: mod_base = OTHER; note = 2'-fluoro adenosine
  modified_base 11: mod_base = OTHER; note = 2'-fluoro cytidine
  modified_base 12: mod_base = OTHER; note = 2'O-methyl uridine
  modified_base 13: mod_base = OTHER; note = 2'O-methyl guanosine
  modified_base 14: mod_base = OTHER; note = 2'O-methyl guanosine
  modified_base 15: mod_base = OTHER; note = 2'O-methyl uridine
  modified_base 16: mod_base = OTHER; note = 2'O-methyl adenosine
  modified_base 17: mod_base = OTHER; note = 2'O-methyl uridine
  modified_base 18: mod_base = OTHER; note = 2'O-methyl cytidine
  modified_base 19: mod_base = OTHER; note = 2'O-methyl adenosine
  modified_base 20: mod_base = OTHER; note = 2'O-methyl adenosine phosphorothioate
  modified_base 21: mod_base = OTHER; note = 2'O-methyl adenosine
ttgggaaaaactggtatcaaa

SEQ ID NO: 366 - RNA, 21 nt, synthetic construct
  source 1..21: mol_type = other RNA
  modified_base 1: mod_base = OTHER; note = 2'O-methyl adenosine phosphorothioate
  modified_base 2: mod_base = OTHER; note = 2'O-methyl adenosine phosphorothioate
  modified_base 3: mod_base = OTHER; note = 2'O-methyl adenosine
  modified_base 4: mod_base = OTHER; note = 2'O-methyl adenosine
  modified_base 5: mod_base = OTHER; note = 2'O-methyl cytidine
  modified_base 6: mod_base = OTHER; note = 2'O-methyl uridine
  modified_base 7: mod_base = OTHER; note = 2'-fluoro guanosine
  modified_base 8: mod_base = OTHER; note = 2'O-methyl guanosine
  modified_base 9: mod_base = OTHER; note = 2'-fluoro uridine
  modified_base 10: mod_base = OTHER; note = 2'-fluoro adenosine
  modified_base 11: mod_base = OTHER; note = 2'-fluoro uridine
  modified_base 12: mod_base = OTHER; note = 2'O-methyl cytidine
  modified_base 13: mod_base = OTHER; note = 2'O-methyl adenosine
  modified_base 14: mod_base = OTHER; note = 2'O-methyl adenosine
  modified_base 15: mod_base = OTHER; note = 2'O-methyl adenosine
  modified_base 16: mod_base = OTHER; note = 2'O-methyl adenosine
  modified_base 17: mod_base = OTHER; note = 2'O-methyl cytidine
  modified_base 18: mod_base = OTHER; note = 2'O-methyl cytidine
  modified_base 19: mod_base = OTHER; note = 2'O-methyl uridine
  modified_base 20: mod_base = OTHER; note = 2'O-methyl cytidine phosphorothioate
  modified_base 21: mod_base = OTHER; note = 2'O-methyl adenosine
aaaactggtatcaaaacctca

SEQ ID NO: 367 - RNA, 21 nt, synthetic construct
  source 1..21: mol_type = other RNA
  modified_base 1: mod_base = OTHER; note = 2'O-methyl adenosine phosphorothioate
  modified_base 2: mod_base = OTHER; note = 2'O-methyl adenosine phosphorothioate
  modified_base 3: mod_base = OTHER; note = 2'O-methyl uridine
  modified_base 4: mod_base = OTHER; note = 2'O-methyl adenosine
  modified_base 5: mod_base = OTHER; note = 2'O-methyl cytidine
  modified_base 6: mod_base = OTHER; note = 2'O-methyl uridine
  modified_base 7: mod_base = OTHER; note = 2'-fluoro guanosine
  modified_base 8: mod_base = OTHER; note = 2'O-methyl guanosine
  modified_base 9: mod_base = OTHER; note = 2'-fluoro guanosine
  modified_base 10: mod_base = OTHER; note = 2'-fluoro uridine
  modified_base 11: mod_base = OTHER; note = 2'-fluoro uridine
  modified_base 12: mod_base = OTHER; note = 2'O-methyl cytidine
  modified_base 13: mod_base = OTHER; note = 2'O-methyl adenosine
  modified_base 14: mod_base = OTHER; note = 2'O-methyl cytidine
  modified_base 15: mod_base = OTHER; note = 2'O-methyl cytidine
  modified_base 16: mod_base = OTHER; note = 2'O-methyl adenosine
  modified_base 17: mod_base = OTHER; note = 2'O-methyl adenosine
  modified_base 18: mod_base = OTHER; note = 2'O-methyl adenosine
  modified_base 19: mod_base = OTHER; note = 2'O-methyl adenosine
  modified_base 20: mod_base = OTHER; note = 2'O-methyl adenosine phosphorothioate
  modified_base 21: mod_base = OTHER; note = 2'O-methyl uridine
aatactgggttcaccaaaaat

SEQ ID NO: 368 - RNA, 21 nt, synthetic construct
  source 1..21: mol_type = other RNA
  modified_base 1: mod_base = OTHER; note = 2'O-methyl cytidine phosphorothioate
  modified_base 2: mod_base = OTHER; note = 2'O-methyl uridine phosphorothioate
  modified_base 3: mod_base = OTHER; note = 2'O-methyl guanosine
  modified_base 4: mod_base = OTHER; note = 2'O-methyl guanosine
  modified_base 5: mod_base = OTHER; note = 2'O-methyl guanosine
  modified_base 6: mod_base = OTHER; note = 2'O-methyl uridine
  modified_base 7: mod_base = OTHER; note = 2'-fluoro uridine
  modified_base 8: mod_base = OTHER; note = 2'O-methyl cytidine
  modified_base 9: mod_base = OTHER; note = 2'-fluoro adenosine
  modified_base 10: mod_base = OTHER; note = 2'-fluoro cytidine
  modified_base 11: mod_base = OTHER; note = 2'-fluoro cytidine
  modified_base 12: mod_base = OTHER; note = 2'O-methyl adenosine
  modified_base 13: mod_base = OTHER; note = 2'O-methyl adenosine
  modified_base 14: mod_base = OTHER; note = 2'O-methyl adenosine
  modified_base 15: mod_base = OTHER; note = 2'O-methyl adenosine
  modified_base 16: mod_base = OTHER; note = 2'O-methyl adenosine
  modified_base 17: mod_base = OTHER; note = 2'O-methyl uridine
  modified_base 18: mod_base = OTHER; note = 2'O-methyl cytidine
  modified_base 19: mod_base = OTHER; note = 2'O-methyl cytidine
  modified_base 20: mod_base = OTHER; note = 2'O-methyl adenosine phosphorothioate
  modified_base 21: mod_base = OTHER; note = 2'O-methyl adenosine
ctgggttcaccaaaaatccaa

SEQ ID NO: 369 - RNA, 21 nt, synthetic construct
  source 1..21: mol_type = other RNA
  modified_base 1: mod_base = OTHER; note = 2'O-methyl adenosine phosphorothioate
  modified_base 2: mod_base = OTHER; note = 2'O-methyl cytidine phosphorothioate
  modified_base 3: mod_base = OTHER; note = 2'O-methyl cytidine
  modified_base 4: mod_base = OTHER; note = 2'O-methyl adenosine
  modified_base 5: mod_base = OTHER; note = 2'O-methyl adenosine
  modified_base 6: mod_base = OTHER; note = 2'O-methyl adenosine
  modified_base 7: mod_base = OTHER; note = 2'-fluoro adenosine
  modified_base 8: mod_base = OTHER; note = 2'O-methyl adenosine
  modified_base 9: mod_base = OTHER; note = 2'-fluoro uridine
  modified_base 10: mod_base = OTHER; note = 2'-fluoro cytidine
  modified_base 11: mod_base = OTHER; note = 2'-fluoro cytidine
  modified_base 12: mod_base = OTHER; note = 2'O-methyl adenosine
  modified_base 13: mod_base = OTHER; note = 2'O-methyl adenosine
  modified_base 14: mod_base = OTHER; note = 2'O-methyl guanosine
  modified_base 15: mod_base = OTHER; note = 2'O-methyl cytidine
  modified_base 16: mod_base = OTHER; note = 2'O-methyl adenosine
  modified_base 17: mod_base = OTHER; note = 2'O-methyl cytidine
  modified_base 18: mod_base = OTHER; note = 2'O-methyl adenosine
  modified_base 19: mod_base = OTHER; note = 2'O-methyl adenosine
  modified_base 20: mod_base = OTHER; note = 2'O-methyl guanosine phosphorothioate
  modified_base 21: mod_base = OTHER; note = 2'O-methyl adenosine
accaaaaatccaagcacaaga

SEQ ID NO: 370 - RNA, 21 nt, synthetic construct
  source 1..21: mol_type = other RNA
  modified_base 1: mod_base = OTHER; note = 2'O-methyl guanosine phosphorothioate
  modified_base 2: mod_base = OTHER; note = 2'O-methyl cytidine phosphorothioate
  modified_base 3: mod_base = OTHER; note = 2'O-methyl cytidine
  modified_base 4: mod_base = OTHER; note = 2'O-methyl uridine
  modified_base 5: mod_base = OTHER; note = 2'O-methyl guanosine
  modified_base 6: mod_base = OTHER; note = 2'O-methyl uridine
  modified_base 7: mod_base = OTHER; note = 2'-fluoro adenosine
  modified_base 8: mod_base = OTHER; note = 2'O-methyl uridine
  modified_base 9: mod_base = OTHER; note = 2'-fluoro uridine
  modified_base 10: mod_base = OTHER; note = 2'-fluoro guanosine
  modified_base 11: mod_base = OTHER; note = 2'-fluoro guanosine
  modified_base 12: mod_base = OTHER; note = 2'O-methyl adenosine
  modified_base 13: mod_base = OTHER; note = 2'O-methyl guanosine
  modified_base 14: mod_base = OTHER; note = 2'O-methyl adenosine
  modified_base 15: mod_base = OTHER; note = 2'O-methyl cytidine
  modified_base 16: mod_base = OTHER; note = 2'O-methyl adenosine
  modified_base 17: mod_base = OTHER; note = 2'O-methyl guanosine
  modified_base 18: mod_base = OTHER; note = 2'O-methyl adenosine
  modified_base 19: mod_base = OTHER; note = 2'O-methyl uridine
  modified_base 20: mod_base = OTHER; note = 2'O-methyl guanosine phosphorothioate
  modified_base 21: mod_base = OTHER; note = 2'O-methyl adenosine
gcctgtattggagacagatga

SEQ ID NO: 371 - RNA, 21 nt, synthetic construct
  source 1..21: mol_type = other RNA
  modified_base 1: mod_base = OTHER; note = 2'O-methyl uridine phosphorothioate
  modified_base 2: mod_base = OTHER; note = 2'O-methyl guanosine phosphorothioate
  modified_base 3: mod_base = OTHER; note = 2'O-methyl adenosine
  modified_base 4: mod_base = OTHER; note = 2'O-methyl adenosine
  modified_base 5: mod_base = OTHER; note = 2'O-methyl guanosine
  modified_base 6: mod_base = OTHER; note = 2'O-methyl uridine
  modified_base 7: mod_base = OTHER; note = 2'-fluoro cytidine
  modified_base 8: mod_base = OTHER; note = 2'O-methyl guanosine
  modified_base 9: mod_base = OTHER; note = 2'-fluoro uridine
  modified_base 10: mod_base = OTHER; note = 2'-fluoro adenosine
  modified_base 11: mod_base = OTHER; note = 2'-fluoro adenosine
  modified_base 12: mod_base = OTHER; note = 2'O-methyl guanosine
  modified_base 13: mod_base = OTHER; note = 2'O-methyl adenosine
  modified_base 14: mod_base = OTHER; note = 2'O-methyl adenosine
  modified_base 15: mod_base = OTHER; note = 2'O-methyl guanosine
  modified_base 16: mod_base = OTHER; note = 2'O-methyl uridine
  modified_base 17: mod_base = OTHER; note = 2'O-methyl cytidine
  modified_base 18: mod_base = OTHER; note = 2'O-methyl uridine
  modified_base 19: mod_base = OTHER; note = 2'O-methyl guanosine
  modified_base 20: mod_base = OTHER; note = 2'O-methyl adenosine phosphorothioate
  modified_base 21: mod_base = OTHER; note = 2'O-methyl uridine
tgaagtcgtaagaagtctgat

SEQ ID NO: 372 - RNA, 21 nt, synthetic construct
  source 1..21: mol_type = other RNA
  modified_base 1: mod_base = OTHER; note = 2'O-methyl uridine phosphorothioate
  modified_base 2: mod_base = OTHER; note = 2'O-methyl adenosine phosphorothioate
  modified_base 3: mod_base = OTHER; note = 2'O-methyl adenosine
  modified_base 4: mod_base = OTHER; note = 2'O-methyl guanosine
  modified_base 5: mod_base = OTHER; note = 2'O-methyl adenosine
  modified_base 6: mod_base = OTHER; note = 2'O-methyl adenosine
  modified_base 7: mod_base = OTHER; note = 2'-fluoro guanosine
  modified_base 8: mod_base = OTHER; note = 2'O-methyl uridine
  modified_base 9: mod_base = OTHER; note = 2'-fluoro cytidine
  modified_base 10: mod_base = OTHER; note = 2'-fluoro uridine
  modified_base 11: mod_base = OTHER; note = 2'-fluoro guanosine
  modified_base 12: mod_base = OTHER; note = 2'O-methyl adenosine
  modified_base 13: mod_base = OTHER; note = 2'O-methyl uridine
  modified_base 14: mod_base = OTHER; note = 2'O-methyl adenosine
  modified_base 15: mod_base = OTHER; note = 2'O-methyl guanosine
  modified_base 16: mod_base = OTHER; note = 2'O-methyl adenosine
  modified_base 17: mod_base = OTHER; note = 2'O-methyl uridine
  modified_base 18: mod_base = OTHER; note = 2'O-methyl guanosine
  modified_base 19: mod_base = OTHER; note = 2'O-methyl guanosine
  modified_base 20: mod_base = OTHER; note = 2'O-methyl adenosine phosphorothioate
  modified_base 21: mod_base = OTHER; note = 2'O-methyl adenosine
taagaagtctgatagatggaa

SEQ ID NO: 373 - RNA, 21 nt, synthetic construct
  source 1..21: mol_type = other RNA
  modified_base 1: mod_base = OTHER; note = 2'O-methyl adenosine phosphorothioate
  modified_base 2: mod_base = OTHER; note = 2'O-methyl adenosine phosphorothioate
  modified_base 3: mod_base = OTHER; note = 2'O-methyl guanosine
  modified_base 4: mod_base = OTHER; note = 2'O-methyl adenosine
  modified_base 5: mod_base = OTHER; note = 2'O-methyl adenosine
  modified_base 6: mod_base = OTHER; note = 2'O-methyl guanosine
  modified_base 7: mod_base = OTHER; note = 2'-fluoro uridine
  modified_base 8: mod_base = OTHER; note = 2'O-methyl cytidine
  modified_base 9: mod_base = OTHER; note = 2'-fluoro uridine
  modified_base 10: mod_base = OTHER; note = 2'-fluoro guanosine
  modified_base 11: mod_base = OTHER; note = 2'-fluoro adenosine
  modified_base 12: mod_base = OTHER; note = 2'O-methyl uridine
  modified_base 13: mod_base = OTHER; note = 2'O-methyl adenosine
  modified_base 14: mod_base = OTHER; note = 2'O-methyl guanosine
  modified_base 15: mod_base = OTHER; note = 2'O-methyl adenosine
  modified_base 16: mod_base = OTHER; note = 2'O-methyl uridine
  modified_base 17: mod_base = OTHER; note = 2'O-methyl guanosine
  modified_base 18: mod_base = OTHER; note = 2'O-methyl guanosine
  modified_base 19: mod_base = OTHER; note = 2'O-methyl adenosine
  modified_base 20: mod_base = OTHER; note = 2'O-methyl adenosine phosphorothioate
  modified_base 21: mod_base = OTHER; note = 2'O-methyl uridine
aagaagtctgatagatggaat

SEQ ID NO: 374 - RNA, 21 nt, synthetic construct
  source 1..21: mol_type = other RNA
  modified_base 1: mod_base = OTHER; note = 2'O-methyl adenosine phosphorothioate
  modified_base 2: mod_base = OTHER; note = 2'O-methyl guanosine phosphorothioate
  modified_base 3: mod_base = OTHER; note = 2'O-methyl adenosine
  modified_base 4: mod_base = OTHER; note = 2'O-methyl adenosine
  modified_base 5: mod_base = OTHER; note = 2'O-methyl guanosine
  modified_base 6: mod_base = OTHER; note = 2'O-methyl uridine
  modified_base 7: mod_base = OTHER; note = 2'-fluoro cytidine
  modified_base 8: mod_base = OTHER; note = 2'O-methyl uridine
  modified_base 9: mod_base = OTHER; note = 2'-fluoro guanosine
  modified_base 10: mod_base = OTHER; note = 2'-fluoro adenosine
  modified_base 11: mod_base = OTHER; note = 2'-fluoro uridine
  modified_base 12: mod_base = OTHER; note = 2'O-methyl adenosine
  modified_base 13: mod_base = OTHER; note = 2'O-methyl guanosine
  modified_base 14: mod_base = OTHER; note = 2'O-methyl adenosine
  modified_base 15: mod_base = OTHER; note = 2'O-methyl uridine
  modified_base 16: mod_base = OTHER; note = 2'O-methyl guanosine
  modified_base 17: mod_base = OTHER; note = 2'O-methyl guanosine
  modified_base 18: mod_base = OTHER; note = 2'O-methyl adenosine
  modified_base 19: mod_base = OTHER; note = 2'O-methyl adenosine
  modified_base 20: mod_base = OTHER; note = 2'O-methyl uridine phosphorothioate
  modified_base 21: mod_base = OTHER; note = 2'O-methyl adenosine
agaagtctgatagatggaata

SEQ ID NO: 375 - RNA, 21 nt, synthetic construct
  source 1..21: mol_type = other RNA
  modified_base 1: mod_base = OTHER; note = 2'O-methyl adenosine phosphorothioate
  modified_base 2: mod_base = OTHER; note = 2'O-methyl adenosine phosphorothioate
  modified_base 3: mod_base = OTHER; note = 2'O-methyl guanosine
  modified_base 4: mod_base = OTHER; note = 2'O-methyl uridine
  modified_base 5: mod_base = OTHER; note = 2'O-methyl cytidine
  modified_base 6: mod_base = OTHER; note = 2'O-methyl uridine
  modified_base 7: mod_base = OTHER; note = 2'-fluoro guanosine
  modified_base 8: mod_base = OTHER; note = 2'O-methyl adenosine
  modified_base 9: mod_base = OTHER; note = 2'-fluoro uridine
  modified_base 10: mod_base = OTHER; note = 2'-fluoro adenosine
  modified_base 11: mod_base = OTHER; note = 2'-fluoro guanosine
  modified_base 12: mod_base = OTHER; note = 2'O-methyl adenosine
  modified_base 13: mod_base = OTHER; note = 2'O-methyl uridine
  modified_base 14: mod_base = OTHER; note = 2'O-methyl guanosine
  modified_base 15: mod_base = OTHER; note = 2'O-methyl guanosine
  modified_base 16: mod_base = OTHER; note = 2'O-methyl adenosine
  modified_base 17: mod_base = OTHER; note = 2'O-methyl adenosine
  modified_base 18: mod_base = OTHER; note = 2'O-methyl uridine
  modified_base 19: mod_base = OTHER; note = 2'O-methyl adenosine
  modified_base 20: mod_base = OTHER; note = 2'O-methyl cytidine phosphorothioate
  modified_base 21: mod_base = OTHER; note = 2'O-methyl uridine
aagtctgatagatggaatact

SEQ ID NO: 376 - RNA, 21 nt, synthetic construct
  source 1..21: mol_type = other RNA
  modified_base 1: mod_base = OTHER; note = 2'O-methyl adenosine phosphorothioate
  modified_base 2: mod_base = OTHER; note = 2'O-methyl guanosine phosphorothioate
  modified_base 3: mod_base = OTHER; note = 2'O-methyl uridine
  modified_base 4: mod_base = OTHER; note = 2'O-methyl cytidine
  modified_base 5: mod_base = OTHER; note = 2'O-methyl uridine
  modified_base 6: mod_base = OTHER; note = 2'O-methyl guanosine
  modified_base 7: mod_base = OTHER; note = 2'-fluoro adenosine
  modified_base 8: mod_base = OTHER; note = 2'O-methyl uridine
  modified_base 9: mod_base = OTHER; note = 2'-fluoro adenosine
  modified_base 10: mod_base = OTHER; note = 2'-fluoro guanosine
  modified_base 11: mod_base = OTHER; note = 2'-fluoro adenosine
  modified_base 12: mod_base = OTHER; note = 2'O-methyl uridine
  modified_base 13: mod_base = OTHER; note = 2'O-methyl guanosine
  modified_base 14: mod_base = OTHER; note = 2'O-methyl guanosine
  modified_base 15: mod_base = OTHER; note = 2'O-methyl adenosine
  modified_base 16: mod_base = OTHER; note = 2'O-methyl adenosine
  modified_base 17: mod_base = OTHER; note = 2'O-methyl uridine
  modified_base 18: mod_base = OTHER; note = 2'O-methyl adenosine
  modified_base 19: mod_base = OTHER; note = 2'O-methyl cytidine
  modified_base 20: mod_base = OTHER; note = 2'O-methyl uridine phosphorothioate
  modified_base 21: mod_base = OTHER; note = 2'O-methyl uridine
agtctgatagatggaatactt

SEQ ID NO: 377 - RNA, 21 nt, synthetic construct
  source 1..21: mol_type = other RNA
  modified_base 1: mod_base = OTHER; note = 2'O-methyl guanosine phosphorothioate
  modified_base 2: mod_base = OTHER; note = 2'O-methyl uridine phosphorothioate
  modified_base 3: mod_base = OTHER; note = 2'O-methyl cytidine
  modified_base 4: mod_base = OTHER; note = 2'O-methyl uridine
  modified_base 5: mod_base = OTHER; note = 2'O-methyl guanosine
  modified_base 6: mod_base = OTHER; note = 2'O-methyl adenosine
  modified_base 7: mod_base = OTHER; note = 2'-fluoro uridine
  modified_base 8: mod_base = OTHER; note = 2'O-methyl adenosine
  modified_base 9: mod_base = OTHER; note = 2'-fluoro guanosine
  modified_base 10: mod_base = OTHER; note = 2'-fluoro adenosine
  modified_base 11: mod_base = OTHER; note = 2'-fluoro uridine
  modified_base 12: mod_base = OTHER; note = 2'O-methyl guanosine
  modified_base 13: mod_base = OTHER; note = 2'O-methyl guanosine
  modified_base 14: mod_base = OTHER; note = 2'O-methyl adenosine
  modified_base 15: mod_base = OTHER; note = 2'O-methyl adenosine
  modified_base 16: mod_base = OTHER; note = 2'O-methyl uridine
  modified_base 17: mod_base = OTHER; note = 2'O-methyl adenosine
  modified_base 18: mod_base = OTHER; note = 2'O-methyl cytidine
  modified_base 19: mod_base = OTHER; note = 2'O-methyl uridine
  modified_base 20: mod_base = OTHER; note = 2'O-methyl uridine phosphorothioate
  modified_base 21: mod_base = OTHER; note = 2'O-methyl adenosine
gtctgatagatggaatactta

SEQ ID NO: 378 - RNA, 21 nt, synthetic construct
  source 1..21: mol_type = other RNA
  modified_base 1: mod_base = OTHER; note = 2'O-methyl adenosine phosphorothioate
  modified_base 2: mod_base = OTHER; note = 2'O-methyl guanosine phosphorothioate
  modified_base 3: mod_base = OTHER; note = 2'O-methyl adenosine
  modified_base 4: mod_base = OTHER; note = 2'O-methyl uridine
  modified_base 5: mod_base = OTHER; note = 2'O-methyl guanosine
  modified_base 6: mod_base = OTHER; note = 2'O-methyl guanosine
  modified_base 7: mod_base = OTHER; note = 2'-fluoro adenosine
  modified_base 8: mod_base = OTHER; note = 2'O-methyl adenosine
  modified_base 9: mod_base = OTHER; note = 2'-fluoro uridine
  modified_base 10: mod_base = OTHER; note = 2'-fluoro adenosine
  modified_base 11: mod_base = OTHER; note = 2'-fluoro cytidine
  modified_base 12: mod_base = OTHER; note = 2'O-methyl uridine
  modified_base 13: mod_base = OTHER; note = 2'O-methyl uridine
  modified_base 14: mod_base = OTHER; note = 2'O-methyl adenosine
  modified_base 15: mod_base = OTHER; note = 2'O-methyl cytidine
  modified_base 16: mod_base = OTHER; note = 2'O-methyl cytidine
  modified_base 17: mod_base = OTHER; note = 2'O-methyl adenosine
  modified_base 18: mod_base = OTHER; note = 2'O-methyl adenosine
  modified_base 19: mod_base = OTHER; note = 2'O-methyl uridine
  modified_base 20: mod_base = OTHER; note = 2'O-methyl adenosine phosphorothioate
  modified_base 21: mod_base = OTHER; note = 2'O-methyl adenosine
agatggaatacttaccaataa

SEQ ID NO: 379 - RNA, 21 nt, synthetic construct
  source 1..21: mol_type = other RNA
  modified_base 1: mod_base = OTHER; note = 2'O-methyl uridine phosphorothioate
  modified_base 2: mod_base = OTHER; note = 2'O-methyl guanosine phosphorothioate
  modified_base 3: mod_base = OTHER; note = 2'O-methyl guanosine
  modified_base 4: mod_base = OTHER; note = 2'O-methyl adenosine
  modified_base 5: mod_base = OTHER; note = 2'O-methyl adenosine
  modified_base 6: mod_base = OTHER; note = 2'O-methyl uridine
  modified_base 7: mod_base = OTHER; note = 2'-fluoro adenosine
  modified_base 8: mod_base = OTHER; note = 2'O-methyl cytidine
  modified_base 9: mod_base = OTHER; note = 2'-fluoro uridine
  modified_base 10: mod_base = OTHER; note = 2'-fluoro uridine
  modified_base 11: mod_base = OTHER; note = 2'-fluoro adenosine
  modified_base 12: mod_base = OTHER; note = 2'O-methyl cytidine
  modified_base 13: mod_base = OTHER; note = 2'O-methyl cytidine
  modified_base 14: mod_base = OTHER; note = 2'O-methyl adenosine
  modified_base 15: mod_base = OTHER; note = 2'O-methyl adenosine
  modified_base 16: mod_base = OTHER; note = 2'O-methyl uridine
  modified_base 17: mod_base = OTHER; note = 2'O-methyl adenosine
  modified_base 18: mod_base = OTHER; note = 2'O-methyl adenosine
  modified_base 19: mod_base = OTHER; note = 2'O-methyl guanosine
  modified_base 20: mod_base = OTHER; note = 2'O-methyl adenosine phosphorothioate
  modified_base 21: mod_base = OTHER; note = 2'O-methyl adenosine
tggaatacttaccaataagaa

SEQ ID NO: 380 - RNA, 21 nt, synthetic construct
  source 1..21: mol_type = other RNA
  modified_base 1: mod_base = OTHER; note = 2'O-methyl guanosine phosphorothioate
  modified_base 2: mod_base = OTHER; note = 2'O-methyl adenosine phosphorothioate
  modified_base 3: mod_base = OTHER; note = 2'O-methyl adenosine
  modified_base 4: mod_base = OTHER; note = 2'O-methyl uridine
  modified_base 5: mod_base = OTHER; note = 2'O-methyl adenosine
  modified_base 6: mod_base = OTHER; note = 2'O-methyl cytidine
  modified_base 7: mod_base = OTHER; note = 2'-fluoro uridine
  modified_base 8: mod_base = OTHER; note = 2'O-methyl uridine
  modified_base 9: mod_base = OTHER; note = 2'-fluoro adenosine
  modified_base 10: mod_base = OTHER; note = 2'-fluoro cytidine
  modified_base 11: mod_base = OTHER; note = 2'-fluoro cytidine
  modified_base 12: mod_base = OTHER; note = 2'O-methyl adenosine
  modified_base 13: mod_base = OTHER; note = 2'O-methyl adenosine
  modified_base 14: mod_base = OTHER; note = 2'O-methyl uridine
  modified_base 15: mod_base = OTHER; note = 2'O-methyl adenosine
  modified_base 16: mod_base = OTHER; note = 2'O-methyl adenosine
  modified_base 17: mod_base = OTHER; note = 2'O-methyl guanosine
  modified_base 18: mod_base = OTHER; note = 2'O-methyl adenosine
  modified_base 19: mod_base = OTHER; note = 2'O-methyl adenosine
  modified_base 20: mod_base = OTHER; note = 2'O-methyl adenosine phosphorothioate
  modified_base 21: mod_base = OTHER; note = 2'O-methyl adenosine
gaatacttaccaataagaaaa

SEQ ID NO: 381 - RNA, 21 nt, synthetic construct
  source 1..21: mol_type = other RNA
  modified_base 1: mod_base = OTHER; note = 2'O-methyl adenosine phosphorothioate
  modified_base 2: mod_base = OTHER; note = 2'O-methyl adenosine phosphorothioate
  modified_base 3: mod_base = OTHER; note = 2'O-methyl uridine
  modified_base 4: mod_base = OTHER; note = 2'O-methyl adenosine
  modified_base 5: mod_base = OTHER; note = 2'O-methyl cytidine
  modified_base 6: mod_base = OTHER; note = 2'O-methyl uridine
  modified_base 7: mod_base = OTHER; note = 2'-fluoro uridine
  modified_base 8: mod_base = OTHER; note = 2'O-methyl adenosine
  modified_base 9: mod_base = OTHER; note = 2'-fluoro cytidine
  modified_base 10: mod_base = OTHER; note = 2'-fluoro cytidine
  modified_base 11: mod_base = OTHER; note = 2'-fluoro adenosine
  modified_base 12: mod_base = OTHER; note = 2'O-methyl adenosine
  modified_base 13: mod_base = OTHER; note = 2'O-methyl uridine
  modified_base 14: mod_base = OTHER; note = 2'O-methyl adenosine
  modified_base 15: mod_base = OTHER; note = 2'O-methyl adenosine
  modified_base 16: mod_base = OTHER; note = 2'O-methyl guanosine
  modified_base 17: mod_base = OTHER; note = 2'O-methyl adenosine
  modified_base 18: mod_base = OTHER; note = 2'O-methyl adenosine
  modified_base 19: mod_base = OTHER; note = 2'O-methyl adenosine
  modified_base 20: mod_base = OTHER; note = 2'O-methyl adenosine phosphorothioate
  modified_base 21: mod_base = OTHER; note = 2'O-methyl uridine
aatacttaccaataagaaaat

SEQ ID NO: 382 - RNA, 21 nt, synthetic construct
  source 1..21: mol_type = other RNA
  modified_base 1: mod_base = OTHER; note = 2'O-methyl adenosine phosphorothioate
  modified_base 2: mod_base = OTHER; note = 2'O-methyl cytidine phosphorothioate
  modified_base 3: mod_base = OTHER; note = 2'O-methyl uridine
  modified_base 4: mod_base = OTHER; note = 2'O-methyl uridine
  modified_base 5: mod_base = OTHER; note = 2'O-methyl adenosine
  modified_base 6: mod_base = OTHER; note = 2'O-methyl cytidine
  modified_base 7: mod_base = OTHER; note = 2'-fluoro cytidine
  modified_base 8: mod_base = OTHER; note = 2'O-methyl adenosine
  modified_base 9: mod_base = OTHER; note = 2'-fluoro adenosine
  modified_base 10: mod_base = OTHER; note = 2'-fluoro uridine
  modified_base 11: mod_base = OTHER; note = 2'-fluoro adenosine
  modified_base 12: mod_base = OTHER; note = 2'O-methyl adenosine
  modified_base 13: mod_base = OTHER; note = 2'O-methyl guanosine
  modified_base 14: mod_base = OTHER; note = 2'O-methyl adenosine
  modified_base 15: mod_base = OTHER; note = 2'O-methyl adenosine
  modified_base 16: mod_base = OTHER; note = 2'O-methyl adenosine
  modified_base 17: mod_base = OTHER; note = 2'O-methyl adenosine
  modified_base 18: mod_base = OTHER; note = 2'O-methyl uridine
  modified_base 19: mod_base = OTHER; note = 2'O-methyl guanosine
  modified_base 20: mod_base = OTHER; note = 2'O-methyl adenosine phosphorothioate
  modified_base 21: mod_base = OTHER; note = 2'O-methyl uridine
acttaccaataagaaaatgat

SEQ ID NO: 383 - RNA, 21 nt, synthetic construct
  source 1..21: mol_type = other RNA
  modified_base 1: mod_base = OTHER; note = 2'O-methyl cytidine phosphorothioate
  modified_base 2: mod_base = OTHER; note = 2'O-methyl uridine phosphorothioate
  modified_base 3: mod_base = OTHER; note = 2'O-methyl uridine
  modified_base 4: mod_base = OTHER; note = 2'O-methyl adenosine
  modified_base 5: mod_base = OTHER; note = 2'O-methyl cytidine
  modified_base 6: mod_base = OTHER; note = 2'O-methyl cytidine
  modified_base 7: mod_base = OTHER; note = 2'-fluoro adenosine
  modified_base 8: mod_base = OTHER; note = 2'O-methyl adenosine
  modified_base 9: mod_base = OTHER; note = 2'-fluoro uridine
  modified_base 10: mod_base = OTHER; note = 2'-fluoro adenosine
  modified_base 11: mod_base = OTHER; note = 2'-fluoro adenosine
  modified_base 12: mod_base = OTHER; note = 2'O-methyl guanosine
  modified_base 13: mod_base = OTHER; note = 2'O-methyl adenosine
  modified_base 14: mod_base = OTHER; note = 2'O-methyl adenosine
  modified_base 15: mod_base = OTHER; note = 2'O-methyl adenosine
  modified_base 16: mod_base = OTHER; note = 2'O-methyl adenosine
  modified_base 17: mod_base = OTHER; note = 2'O-methyl uridine
  modified_base 18: mod_base = OTHER; note = 2'O-methyl guanosine
  modified_base 19: mod_base = OTHER; note = 2'O-methyl adenosine
  modified_base 20: mod_base = OTHER; note = 2'O-methyl uridine phosphorothioate
  modified_base 21: mod_base = OTHER; note = 2'O-methyl uridine
cttaccaataagaaaatgatt

SEQ ID NO: 384 - RNA, 21 nt, synthetic construct
  source 1..21: mol_type = other RNA
  modified_base 1: mod_base = OTHER; note = 2'O-methyl uridine phosphorothioate
  modified_base 2: mod_base = OTHER; note = 2'O-methyl uridine phosphorothioate
  modified_base 3: mod_base = OTHER; note = 2'O-methyl adenosine
  modified_base 4: mod_base = OTHER; note = 2'O-methyl cytidine
  modified_base 5: mod_base = OTHER; note = 2'O-methyl cytidine
  modified_base 6: mod_base = OTHER; note = 2'O-methyl adenosine
  modified_base 7: mod_base = OTHER; note = 2'-fluoro adenosine
  modified_base 8: mod_base = OTHER; note = 2'O-methyl uridine
  modified_base 9: mod_base = OTHER; note = 2'-fluoro adenosine
  modified_base 10: mod_base = OTHER; note = 2'-fluoro adenosine
  modified_base 11: mod_base = OTHER; note = 2'-fluoro guanosine
  modified_base 12: mod_base = OTHER; note = 2'O-methyl adenosine
  modified_base 13: mod_base = OTHER; note = 2'O-methyl adenosine
  modified_base 14: mod_base = OTHER; note = 2'O-methyl adenosine
  modified_base 15: mod_base = OTHER; note = 2'O-methyl adenosine
  modified_base 16: mod_base = OTHER; note = 2'O-methyl uridine
  modified_base 17: mod_base = OTHER; note = 2'O-methyl guanosine
  modified_base 18: mod_base = OTHER; note = 2'O-methyl adenosine
  modified_base 19: mod_base = OTHER; note = 2'O-methyl uridine
  modified_base 20: mod_base = OTHER; note = 2'O-methyl uridine phosphorothioate
  modified_base 21: mod_base = OTHER; note = 2'O-methyl uridine
ttaccaataagaaaatgattt

SEQ ID NO: 385 - RNA, 21 nt, synthetic construct
  source 1..21: mol_type = other RNA
  modified_base 1: mod_base = OTHER; note = 2'O-methyl uridine phosphorothioate
  modified_base 2: mod_base = OTHER; note = 2'O-methyl adenosine phosphorothioate
  modified_base 3: mod_base = OTHER; note = 2'O-methyl cytidine
  modified_base 4: mod_base = OTHER; note = 2'O-methyl cytidine
  modified_base 5: mod_base = OTHER; note = 2'O-methyl adenosine
  modified_base 6: mod_base = OTHER; note = 2'O-methyl adenosine
  modified_base 7: mod_base = OTHER; note = 2'-fluoro uridine
  modified_base 8: mod_base = OTHER; note = 2'O-methyl adenosine
  modified_base 9: mod_base = OTHER; note = 2'-fluoro adenosine
  modified_base 10: mod_base = OTHER; note = 2'-fluoro guanosine
  modified_base 11: mod_base = OTHER; note = 2'-fluoro adenosine
  modified_base 12: mod_base = OTHER; note = 2'O-methyl adenosine
  modified_base 13: mod_base = OTHER; note = 2'O-methyl adenosine
  modified_base 14: mod_base = OTHER; note = 2'O-methyl adenosine
  modified_base 15: mod_base = OTHER; note = 2'O-methyl uridine
  modified_base 16: mod_base = OTHER; note = 2'O-methyl guanosine
  modified_base 17: mod_base = OTHER; note = 2'O-methyl adenosine
  modified_base 18: mod_base = OTHER; note = 2'O-methyl uridine
  modified_base 19: mod_base = OTHER; note = 2'O-methyl uridine
  modified_base 20: mod_base = OTHER; note = 2'O-methyl uridine phosphorothioate
  modified_base 21: mod_base = OTHER; note = 2'O-methyl uridine
taccaataagaaaatgatttt

SEQ ID NO: 386 - RNA, 21 nt, synthetic construct
  source 1..21: mol_type = other RNA
  modified_base 1: mod_base = OTHER; note = 2'O-methyl adenosine phosphorothioate
  modified_base 2: mod_base = OTHER; note = 2'O-methyl cytidine phosphorothioate
  modified_base 3: mod_base = OTHER; note = 2'O-methyl cytidine
  modified_base 4: mod_base = OTHER; note = 2'O-methyl adenosine
  modified_base 5: mod_base = OTHER; note = 2'O-methyl adenosine
  modified_base 6: mod_base = OTHER; note = 2'O-methyl uridine
  modified_base 7: mod_base = OTHER; note = 2'-fluoro adenosine
  modified_base 8: mod_base = OTHER; note = 2'O-methyl adenosine
  modified_base 9: mod_base = OTHER; note = 2'-fluoro guanosine
  modified_base 10: mod_base = OTHER; note = 2'-fluoro adenosine
  modified_base 11: mod_base = OTHER; note = 2'-fluoro adenosine
  modified_base 12: mod_base = OTHER; note = 2'O-methyl adenosine
  modified_base 13: mod_base = OTHER; note = 2'O-methyl adenosine
  modified_base 14: mod_base = OTHER; note = 2'O-methyl uridine
  modified_base 15: mod_base = OTHER; note = 2'O-methyl guanosine
  modified_base 16: mod_base = OTHER; note = 2'O-methyl adenosine
  modified_base 17: mod_base = OTHER; note = 2'O-methyl uridine
  modified_base 18: mod_base = OTHER; note = 2'O-methyl uridine
  modified_base 19: mod_base = OTHER; note = 2'O-methyl uridine
  modified_base 20: mod_base = OTHER; note = 2'O-methyl uridine phosphorothioate
  modified_base 21: mod_base = OTHER; note = 2'O-methyl uridine
accaataagaaaatgattttt

SEQ ID NO: 387 - RNA, 21 nt, synthetic construct
  source 1..21: mol_type = other RNA
  modified_base 1: mod_base = OTHER; note = 2'O-methyl cytidine phosphorothioate
  modified_base 2: mod_base = OTHER; note = 2'O-methyl adenosine phosphorothioate
  modified_base 3: mod_base = OTHER; note = 2'O-methyl adenosine
  modified_base 4: mod_base = OTHER; note = 2'O-methyl uridine
  modified_base 5: mod_base = OTHER; note = 2'O-methyl adenosine
  modified_base 6: mod_base = OTHER; note = 2'O-methyl adenosine
  modified_base 7: mod_base = OTHER; note = 2'-fluoro guanosine
  modified_base 8: mod_base = OTHER; note = 2'O-methyl adenosine
  modified_base 9: mod_base = OTHER; note = 2'-fluoro adenosine
  modified_base 10: mod_base = OTHER; note = 2'-fluoro adenosine
  modified_base 11: mod_base = OTHER; note = 2'-fluoro adenosine
  modified_base 12: mod_base = OTHER; note = 2'O-methyl uridine
  modified_base 13: mod_base = OTHER; note = 2'O-methyl guanosine
  modified_base 14: mod_base = OTHER; note = 2'O-methyl adenosine
  modified_base 15: mod_base = OTHER; note = 2'O-methyl uridine
  modified_base 16: mod_base = OTHER; note = 2'O-methyl uridine
  modified_base 17: mod_base = OTHER; note = 2'O-methyl uridine
  modified_base 18: mod_base = OTHER; note = 2'O-methyl uridine
  modified_base 19: mod_base = OTHER; note = 2'O-methyl uridine
  modified_base 20: mod_base = OTHER; note = 2'O-methyl guanosine phosphorothioate
  modified_base 21: mod_base = OTHER; note = 2'O-methyl uridine
caataagaaaatgatttttgt

SEQ ID NO: 388 - RNA, 21 nt, synthetic construct
  source 1..21: mol_type = other RNA
  modified_base 1: mod_base = OTHER; note = 2'O-methyl adenosine phosphorothioate
  modified_base 2: mod_base = OTHER; note = 2'O-methyl adenosine phosphorothioate
  modified_base 3: mod_base = OTHER; note = 2'O-methyl uridine
  modified_base 4: mod_base = OTHER; note = 2'O-methyl adenosine
  modified_base 5: mod_base = OTHER; note = 2'O-methyl adenosine
  modified_base 6: mod_base = OTHER; note = 2'O-methyl guanosine
  modified_base 7: mod_base = OTHER; note = 2'-fluoro adenosine
  modified_base 8: mod_base = OTHER; note = 2'O-methyl adenosine
  modified_base 9: mod_base = OTHER; note = 2'-fluoro adenosine
  modified_base 10: mod_base = OTHER; note = 2'-fluoro adenosine
  modified_base 11: mod_base = OTHER; note = 2'-fluoro uridine
  modified_base 12: mod_base = OTHER; note = 2'O-methyl guanosine
  modified_base 13: mod_base = OTHER; note = 2'O-methyl adenosine
  modified_base 14: mod_base = OTHER; note = 2'O-methyl uridine
  modified_base 15: mod_base = OTHER; note = 2'O-methyl uridine
  modified_base 16: mod_base = OTHER; note = 2'O-methyl uridine
  modified_base 17: mod_base = OTHER; note = 2'O-methyl uridine
  modified_base 18: mod_base = OTHER; note = 2'O-methyl uridine
  modified_base 19: mod_base = OTHER; note = 2'O-methyl guanosine
  modified_base 20: mod_base = OTHER; note = 2'O-methyl uridine phosphorothioate
  modified_base 21: mod_base = OTHER; note = 2'O-methyl uridine
aataagaaaatgatttttgtt

SEQ ID NO: 389 - RNA, 21 nt, synthetic construct
  source 1..21: mol_type = other RNA
  modified_base 1: mod_base = OTHER; note = 2'O-methyl adenosine phosphorothioate
  modified_base 2: mod_base = OTHER; note = 2'O-methyl adenosine phosphorothioate
  modified_base 3: mod_base = OTHER; note = 2'O-methyl guanosine
  modified_base 4: mod_base = OTHER; note = 2'O-methyl adenosine
  modified_base 5: mod_base = OTHER; note = 2'O-methyl adenosine
  modified_base 6: mod_base = OTHER; note = 2'O-methyl adenosine
  modified_base 7: mod_base = OTHER; note = 2'-fluoro adenosine
  modified_base 8: mod_base = OTHER; note = 2'O-methyl uridine
  modified_base 9: mod_base = OTHER; note = 2'-fluoro guanosine
  modified_base 10: mod_base = OTHER; note = 2'-fluoro adenosine
  modified_base 11: mod_base = OTHER; note = 2'-fluoro uridine
  modified_base 12: mod_base = OTHER; note = 2'O-methyl uridine
  modified_base 13: mod_base = OTHER; note = 2'O-methyl uridine
  modified_base 14: mod_base = OTHER; note = 2'O-methyl uridine
  modified_base 15: mod_base = OTHER; note = 2'O-methyl uridine
  modified_base 16: mod_base = OTHER; note = 2'O-methyl guanosine
  modified_base 17: mod_base = OTHER; note = 2'O-methyl uridine
  modified_base 18: mod_base = OTHER; note = 2'O-methyl uridine
  modified_base 19: mod_base = OTHER; note = 2'O-methyl cytidine
  modified_base 20: mod_base = OTHER; note = 2'O-methyl cytidine phosphorothioate
  modified_base 21: mod_base = OTHER; note = 2'O-methyl adenosine
aagaaaatgatttttgttcca

SEQ ID NO: 390 - RNA, 21 nt, synthetic construct
  source 1..21: mol_type = other RNA
  modified_base 1: mod_base = OTHER; note = 2'O-methyl adenosine phosphorothioate
  modified_base 2: mod_base = OTHER; note = 2'O-methyl guanosine phosphorothioate
  modified_base 3: mod_base = OTHER; note = 2'O-methyl adenosine
  modified_base 4: mod_base = OTHER; note = 2'O-methyl adenosine
  modified_base 5: mod_base = OTHER; note = 2'O-methyl adenosine
  modified_base 6: mod_base = OTHER; note = 2'O-methyl adenosine
  modified_base 7: mod_base = OTHER; note = 2'-fluoro uridine
  modified_base 8: mod_base = OTHER; note = 2'O-methyl guanosine
  modified_base 9: mod_base = OTHER; note = 2'-fluoro adenosine
  modified_base 10: mod_base = OTHER; note = 2'-fluoro uridine
  modified_base 11: mod_base = OTHER; note = 2'-fluoro uridine
  modified_base 12: mod_base = OTHER; note = 2'O-methyl uridine
  modified_base 13: mod_base = OTHER; note = 2'O-methyl uridine
  modified_base 14: mod_base = OTHER; note = 2'O-methyl uridine
  modified_base 15: mod_base = OTHER; note = 2'O-methyl guanosine
  modified_base 16: mod_base = OTHER; note = 2'O-methyl uridine
  modified_base 17: mod_base = OTHER; note = 2'O-methyl uridine
  modified_base 18: mod_base = OTHER; note = 2'O-methyl cytidine
  modified_base 19: mod_base = OTHER; note = 2'O-methyl cytidine
  modified_base 20: mod_base = OTHER; note = 2'O-methyl adenosine phosphorothioate
  modified_base 21: mod_base = OTHER; note = 2'O-methyl uridine
agaaaatgatttttgttccat

SEQ ID NO: 391 - RNA, 21 nt, synthetic construct
  source 1..21: mol_type = other RNA
  modified_base 1: mod_base = OTHER; note = 2'O-methyl adenosine phosphorothioate
  modified_base 2: mod_base = OTHER; note = 2'O-methyl adenosine phosphorothioate
  modified_base 3: mod_base = OTHER; note = 2'O-methyl uridine
  modified_base 4: mod_base = OTHER; note = 2'O-methyl guanosine
  modified_base 5: mod_base = OTHER; note = 2'O-methyl adenosine
  modified_base 6: mod_base = OTHER; note = 2'O-methyl uridine
  modified_base 7: mod_base = OTHER; note = 2'-fluoro uridine
  modified_base 8: mod_base = OTHER; note = 2'O-methyl uridine
  modified_base 9: mod_base = OTHER; note = 2'-fluoro uridine
  modified_base 10: mod_base = OTHER; note = 2'-fluoro uridine
  modified_base 11: mod_base = OTHER; note = 2'-fluoro guanosine
  modified_base 12: mod_base = OTHER; note = 2'O-methyl uridine
  modified_base 13: mod_base = OTHER; note = 2'O-methyl uridine
  modified_base 14: mod_base = OTHER; note = 2'O-methyl cytidine
  modified_base 15: mod_base = OTHER; note = 2'O-methyl cytidine
  modified_base 16: mod_base = OTHER; note = 2'O-methyl adenosine
  modified_base 17: mod_base = OTHER; note = 2'O-methyl uridine
  modified_base 18: mod_base = OTHER; note = 2'O-methyl cytidine
  modified_base 19: mod_base = OTHER; note = 2'O-methyl guanosine
  modified_base 20: mod_base = OTHER; note = 2'O-methyl uridine phosphorothioate
  modified_base 21: mod_base = OTHER; note = 2'O-methyl adenosine
aatgatttttgttccatcgta

SEQ ID NO: 392 - RNA, 21 nt, synthetic construct
  source 1..21: mol_type = other RNA
  modified_base 1: mod_base = OTHER; note = 2'O-methyl adenosine phosphorothioate
  modified_base 2: mod_base = OTHER; note = 2'O-methyl uridine phosphorothioate
  modified_base 3: mod_base = OTHER; note = 2'O-methyl guanosine
  modified_base 4: mod_base = OTHER; note = 2'O-methyl adenosine
  modified_base 5: mod_base = OTHER; note = 2'O-methyl uridine
  modified_base 6: mod_base = OTHER; note = 2'O-methyl uridine
  modified_base 7: mod_base = OTHER; note = 2'-fluoro uridine
  modified_base 8: mod_base = OTHER; note = 2'O-methyl uridine
  modified_base 9: mod_base = OTHER; note = 2'-fluoro uridine
  modified_base 10: mod_base = OTHER; note = 2'-fluoro guanosine
  modified_base 11: mod_base = OTHER; note = 2'-fluoro uridine
  modified_base 12: mod_base = OTHER; note = 2'O-methyl uridine
  modified_base 13: mod_base = OTHER; note = 2'O-methyl cytidine
  modified_base 14: mod_base = OTHER; note = 2'O-methyl cytidine
  modified_base 15: mod_base = OTHER; note = 2'O-methyl adenosine
  modified_base 16: mod_base = OTHER; note = 2'O-methyl uridine
  modified_base 17: mod_base = OTHER; note = 2'O-methyl cytidine
  modified_base 18: mod_base = OTHER; note = 2'O-methyl guanosine
  modified_base 19: mod_base = OTHER; note = 2'O-methyl uridine
  modified_base 20: mod_base = OTHER; note = 2'O-methyl adenosine phosphorothioate
  modified_base 21: mod_base = OTHER; note = 2'O-methyl uridine
atgatttttgttccatcgtat

SEQ ID NO: 393 - RNA, 21 nt, synthetic construct
  source 1..21: mol_type = other RNA
  modified_base 1: mod_base = OTHER; note = 2'O-methyl uridine phosphorothioate
  modified_base 2: mod_base = OTHER; note = 2'O-methyl uridine phosphorothioate
  modified_base 3: mod_base = OTHER; note = 2'O-methyl uridine
  modified_base 4: mod_base = OTHER; note = 2'O-methyl uridine
  modified_base 5: mod_base = OTHER; note = 2'O-methyl guanosine
  modified_base 6: mod_base = OTHER; note = 2'O-methyl uridine
  modified_base 7: mod_base = OTHER; note = 2'-fluoro uridine
  modified_base 8: mod_base = OTHER; note = 2'O-methyl cytidine
  modified_base 9: mod_base = OTHER; note = 2'-fluoro cytidine
  modified_base 10: mod_base = OTHER; note = 2'-fluoro adenosine
  modified_base 11: mod_base = OTHER; note = 2'-fluoro uridine
  modified_base 12: mod_base = OTHER; note = 2'O-methyl cytidine
  modified_base 13: mod_base = OTHER; note = 2'O-methyl guanosine
  modified_base 14: mod_base = OTHER; note = 2'O-methyl uridine
  modified_base 15: mod_base = OTHER; note = 2'O-methyl adenosine
  modified_base 16: mod_base = OTHER; note = 2'O-methyl uridine
  modified_base 17: mod_base = OTHER; note = 2'O-methyl adenosine
  modified_base 18: mod_base = OTHER; note = 2'O-methyl uridine
  modified_base 19: mod_base = OTHER; note = 2'O-methyl cytidine
  modified_base 20: mod_base = OTHER; note = 2'O-methyl adenosine phosphorothioate
  modified_base 21: mod_base = OTHER; note = 2'O-methyl adenosine
ttttgttccatcgtatatcaa

SEQ ID NO: 394 - RNA, 21 nt, synthetic construct
  source 1..21: mol_type = other RNA
  modified_base 1: mod_base = OTHER; note = 2'O-methyl uridine phosphorothioate
  modified_base 2: mod_base = OTHER; note = 2'O-methyl uridine phosphorothioate
  modified_base 3: mod_base = OTHER; note = 2'O-methyl uridine
  modified_base 4: mod_base = OTHER; note = 2'O-methyl guanosine
  modified_base 5: mod_base = OTHER; note = 2'O-methyl uridine
  modified_base 6: mod_base = OTHER; note = 2'O-methyl uridine
  modified_base 7: mod_base = OTHER; note = 2'-fluoro cytidine
  modified_base 8: mod_base = OTHER; note = 2'O-methyl cytidine
  modified_base 9: mod_base = OTHER; note = 2'-fluoro adenosine
  modified_base 10: mod_base = OTHER; note = 2'-fluoro uridine
  modified_base 11: mod_base = OTHER; note = 2'-fluoro cytidine
  modified_base 12: mod_base = OTHER; note = 2'O-methyl guanosine
  modified_base 13: mod_base = OTHER; note = 2'O-methyl uridine
  modified_base 14: mod_base = OTHER; note = 2'O-methyl adenosine
  modified_base 15: mod_base = OTHER; note = 2'O-methyl uridine
  modified_base 16: mod_base = OTHER; note = 2'O-methyl adenosine
  modified_base 17: mod_base = OTHER; note = 2'O-methyl uridine
  modified_base 18: mod_base = OTHER; note = 2'O-methyl cytidine
  modified_base 19: mod_base = OTHER; note = 2'O-methyl adenosine
  modified_base 20: mod_base = OTHER; note = 2'O-methyl adenosine phosphorothioate
  modified_base 21: mod_base = OTHER; note = 2'O-methyl uridine
tttgttccatcgtatatcaat

SEQ ID NO: 395 - RNA, 21 nt, synthetic construct
  source 1..21: mol_type = other RNA
  modified_base 1: mod_base = OTHER; note = 2'O-methyl uridine phosphorothioate
  modified_base 2: mod_base = OTHER; note = 2'O-methyl uridine phosphorothioate
  modified_base 3: mod_base = OTHER; note = 2'O-methyl cytidine
  modified_base 4: mod_base = OTHER; note = 2'O-methyl adenosine
  modified_base 5: mod_base = OTHER; note = 2'O-methyl uridine
  modified_base 6: mod_base = OTHER; note = 2'O-methyl uridine
  modified_base 7: mod_base = OTHER; note = 2'-fluoro cytidine
  modified_base 8: mod_base = OTHER; note = 2'O-methyl cytidine
  modified_base 9: mod_base = OTHER; note = 2'-fluoro uridine
  modified_base 10: mod_base = OTHER; note = 2'-fluoro cytidine
  modified_base 11: mod_base = OTHER; note = 2'-fluoro adenosine
  modified_base 12: mod_base = OTHER; note = 2'O-methyl guanosine
  modified_base 13: mod_base = OTHER; note = 2'O-methyl adenosine
  modified_base 14: mod_base = OTHER; note = 2'O-methyl guanosine
  modified_base 15: mod_base = OTHER; note = 2'O-methyl guanosine
  modified_base 16: mod_base = OTHER; note = 2'O-methyl adenosine
  modified_base 17: mod_base = OTHER; note = 2'O-methyl guanosine
  modified_base 18: mod_base = OTHER; note = 2'O-methyl adenosine
  modified_base 19: mod_base = OTHER; note = 2'O-methyl adenosine
  modified_base 20: mod_base = OTHER; note = 2'O-methyl adenosine phosphorothioate
  modified_base 21: mod_base = OTHER; note = 2'O-methyl adenosine
ttcattcctcagaggagaaaa

SEQ ID NO: 396 - RNA, 21 nt, synthetic construct
  source 1..21: mol_type = other RNA
  modified_base 1: mod_base = OTHER; note = 2'O-methyl adenosine phosphorothioate
  modified_base 2: mod_base = OTHER; note = 2'O-methyl guanosine phosphorothioate
  modified_base 3: mod_base = OTHER; note = 2'O-methyl adenosine
  modified_base 4: mod_base = OTHER; note = 2'O-methyl adenosine
  modified_base 5: mod_base = OTHER; note = 2'O-methyl adenosine
  modified_base 6: mod_base = OTHER; note = 2'O-methyl guanosine
  modified_base 7: mod_base = OTHER; note = 2'-fluoro adenosine
  modified_base 8: mod_base = OTHER; note = 2'O-methyl adenosine
  modified_base 9: mod_base = OTHER; note = 2'-fluoro guanosine
  modified_base 10: mod_base = OTHER; note = 2'-fluoro uridine
  modified_base 11: mod_base = OTHER; note = 2'-fluoro guanosine
  modified_base 12: mod_base = OTHER; note = 2'O-methyl guanosine
  modified_base 13: mod_base = OTHER; note = 2'O-methyl guanosine
  modified_base 14: mod_base = OTHER; note = 2'O-methyl uridine
  modified_base 15: mod_base = OTHER; note = 2'O-methyl guanosine
  modified_base 16: mod_base = OTHER; note = 2'O-methyl adenosine
  modified_base 17: mod_base = OTHER; note = 2'O-methyl uridine
  modified_base 18: mod_base = OTHER; note = 2'O-methyl guanosine
  modified_base 19: mod_base = OTHER; note = 2'O-methyl uridine
  modified_base 20: mod_base = OTHER; note = 2'O-methyl adenosine phosphorothioate
  modified_base 21: mod_base = OTHER; note = 2'O-methyl adenosine
agaaagaagtgggtgatgtaa

SEQ ID NO: 397 - RNA, 21 nt, synthetic construct
  source 1..21: mol_type = other RNA
  modified_base 1: mod_base = OTHER; note = 2'O-methyl cytidine phosphorothioate
  modified_base 2: mod_base = OTHER; note = 2'O-methyl adenosine phosphorothioate
  modified_base 3: mod_base = OTHER; note = 2'O-methyl adenosine
  modified_base 4: mod_base = OTHER; note = 2'O-methyl guanosine
  modified_base 5: mod_base = OTHER; note = 2'O-methyl guanosine
  modified_base 6: mod_base = OTHER; note = 2'O-methyl adenosine
  modified_base 7: mod_base = OTHER; note = 2'-fluoro uridine
  modified_base 8: mod_base = OTHER; note = 2'O-methyl guanosine
  modified_base 9: mod_base = OTHER; note = 2'-fluoro adenosine
  modified_base 10: mod_base = OTHER; note = 2'-fluoro adenosine
  modified_base 11: mod_base = OTHER; note = 2'-fluoro guanosine
  modified_base 12: mod_base = OTHER; note = 2'O-methyl adenosine
  modified_base 13: mod_base = OTHER; note = 2'O-methyl guanosine
  modified_base 14: mod_base = OTHER; note = 2'O-methyl adenosine
  modified_base 15: mod_base = OTHER; note = 2'O-methyl uridine
  modified_base 16: mod_base = OTHER; note = 2'O-methyl uridine
  modified_base 17: mod_base = OTHER; note = 2'O-methyl adenosine
  modified_base 18: mod_base = OTHER; note = 2'O-methyl cytidine
  modified_base 19: mod_base = OTHER; note = 2'O-methyl cytidine
  modified_base 20: mod_base = OTHER; note = 2'O-methyl adenosine phosphorothioate
  modified_base 21: mod_base = OTHER; note = 2'O-methyl adenosine
caaggatgaagagattaccaa

SEQ ID NO: 398 - RNA, 21 nt, synthetic construct
  source 1..21: mol_type = other RNA
  modified_base 1: mod_base = OTHER; note = 2'O-methyl cytidine phosphorothioate
  modified_base 2: mod_base = OTHER; note = 2'O-methyl uridine phosphorothioate
  modified_base 3: mod_base = OTHER; note = 2'O-methyl adenosine
  modified_base 4: mod_base = OTHER; note = 2'O-methyl guanosine
  modified_base 5: mod_base = OTHER; note = 2'O-methyl guanosine
  modified_base 6: mod_base = OTHER; note = 2'O-methyl adenosine
  modified_base 7: mod_base = OTHER; note = 2'-fluoro cytidine
  modified_base 8: mod_base = OTHER; note = 2'O-methyl adenosine
  modified_base 9: mod_base = OTHER; note = 2'-fluoro uridine
  modified_base 10: mod_base = OTHER; note = 2'-fluoro uridine
  modified_base 11: mod_base = OTHER; note = 2'-fluoro uridine
  modified_base 12: mod_base = OTHER; note = 2'O-methyl uridine
  modified_base 13: mod_base = OTHER; note = 2'O-methyl uridine
  modified_base 14: mod_base = OTHER; note = 2'O-methyl guanosine
  modified_base 15: mod_base = OTHER; note = 2'O-methyl guanosine
  modified_base 16: mod_base = OTHER; note = 2'O-methyl adenosine
  modified_base 17: mod_base = OTHER; note = 2'O-methyl uridine
  modified_base 18: mod_base = OTHER; note = 2'O-methyl cytidine
  modified_base 19: mod_base = OTHER; note = 2'O-methyl adenosine
  modified_base 20: mod_base = OTHER; note = 2'O-methyl cytidine phosphorothioate
  modified_base 21: mod_base = OTHER; note = 2'O-methyl adenosine
ctaggacatttttggatcaca

SEQ ID NO: 399 - RNA, 21 nt, synthetic construct
  source 1..21: mol_type = other RNA
  modified_base 1: mod_base = OTHER; note = 2'O-methyl uridine phosphorothioate
  modified_base 2: mod_base = OTHER; note = 2'O-methyl guanosine phosphorothioate
  modified_base 3: mod_base = OTHER; note = 2'O-methyl guanosine
  modified_base 4: mod_base = OTHER; note = 2'O-methyl adenosine
  modified_base 5: mod_base = OTHER; note = 2'O-methyl uridine
  modified_base 6: mod_base = OTHER; note = 2'O-methyl cytidine
  modified_base 7: mod_base = OTHER; note = 2'-fluoro adenosine
  modified_base 8: mod_base = OTHER; note = 2'O-methyl cytidine
  modified_base 9: mod_base = OTHER; note = 2'-fluoro adenosine
  modified_base 10: mod_base = OTHER; note = 2'-fluoro adenosine
  modified_base 11: mod_base = OTHER; note = 2'-fluoro adenosine
  modified_base 12: mod_base = OTHER; note = 2'O-methyl adenosine
  modified_base 13: mod_base = OTHER; note = 2'O-methyl guanosine
  modified_base 14: mod_base = OTHER; note = 2'O-methyl cytidine
  modified_base 15: mod_base = OTHER; note = 2'O-methyl adenosine
  modified_base 16: mod_base = OTHER; note = 2'O-methyl cytidine
  modified_base 17: mod_base = OTHER; note = 2'O-methyl uridine
  modified_base 18: mod_base = OTHER; note = 2'O-methyl uridine
  modified_base 19: mod_base = OTHER; note = 2'O-methyl cytidine
  modified_base 20: mod_base = OTHER; note = 2'O-methyl uridine phosphorothioate
  modified_base 21: mod_base = OTHER; note = 2'O-methyl uridine
tggatcacaaaagcacttctt

SEQ ID NO: 400 - RNA, 21 nt, synthetic construct
  source 1..21: mol_type = other RNA
  modified_base 1: mod_base = OTHER; note = 2'O-methyl uridine phosphorothioate
  modified_base 2: mod_base = OTHER; note = 2'O-methyl guanosine phosphorothioate
  modified_base 3: mod_base = OTHER; note = 2'O-methyl guanosine
  modified_base 4: mod_base = OTHER; note = 2'O-methyl adenosine
  modified_base 5: mod_base = OTHER; note = 2'O-methyl guanosine
  modified_base 6: mod_base = OTHER; note = 2'O-methyl uridine
  modified_base 7: mod_base = OTHER; note = 2'-fluoro cytidine
  modified_base 8: mod_base = OTHER; note = 2'O-methyl guanosine
  modified_base 9: mod_base = OTHER; note = 2'-fluoro uridine
  modified_base 10: mod_base = OTHER; note = 2'-fluoro uridine
  modified_base 11: mod_base = OTHER; note = 2'-fluoro guanosine
  modified_base 12: mod_base = OTHER; note = 2'O-methyl guanosine
  modified_base 13: mod_base = OTHER; note = 2'O-methyl uridine
  modified_base 14: mod_base = OTHER; note = 2'O-methyl guanosine
  modified_base 15: mod_base = OTHER; note = 2'O-methyl adenosine
  modified_base 16: mod_base = OTHER; note = 2'O-methyl adenosine
  modified_base 17: mod_base = OTHER; note = 2'O-methyl guanosine
  modified_base 18: mod_base = OTHER; note = 2'O-methyl uridine
  modified_base 19: mod_base = OTHER; note = 2'O-methyl uridine
  modified_base 20: mod_base = OTHER; note = 2'O-methyl uridine phosphorothioate
  modified_base 21: mod_base = OTHER; note = 2'O-methyl uridine 6-(5-(((2R,3R,4R,5R,6R)-3-acetamido-4,5-dihydroxy-6-(hydrox ymethyl)tetrahydro-2H-pyran-2-yl)oxy)pentanamido)-N-(6-(4-( hydroxymethyl)-4-(methoxymethyl)piperidin-1-yl)-6-oxohexyl) hexanamide-phosphorothioate-6-(5-(((2R,3R,4R,5R,6R)-3-aceta mido-4,5-dihydroxy-6-(hydroxymethyl)tetrahydro-2H-pyran-2-y l)oxy)pentanamido)-N-(6-(4-(hydroxymethyl)-4-(methoxymethyl )piperidin-1-yl)-6-oxohexyl)hexanamide-phosphorothioate-6-( 5-(((2R,3R,4R,5R,6R)-3-acetamido-4,5-dihydroxy-6-(hydroxyme thyl)tetrahydro-2H-pyran-2-yl)oxy)pentanamido)-N-(6-(4-(hyd roxymethyl)-4-(methoxymethyl)piperidin-1-yl)-6-oxohexyl)hex anamide
tggagtcgttggtgaagtttt

SEQ ID NO: 401 - RNA, 21 nt, synthetic construct
  source 1..21: mol_type = other RNA
  modified_base 1: mod_base = OTHER; note = 2'O-methyl uridine phosphorothioate
  modified_base 2: mod_base = OTHER; note = 2'O-methyl adenosine phosphorothioate
  modified_base 3: mod_base = OTHER; note = 2'O-methyl uridine
  modified_base 4: mod_base = OTHER; note = 2'O-methyl uridine
  modified_base 5: mod_base = OTHER; note = 2'O-methyl guanosine
  modified_base 6: mod_base = OTHER; note = 2'O-methyl guanosine
  modified_base 7: mod_base = OTHER; note = 2'-fluoro uridine
  modified_base 8: mod_base = OTHER; note = 2'O-methyl uridine
  modified_base 9: mod_base = OTHER; note = 2'-fluoro cytidine
  modified_base 10: mod_base = OTHER; note = 2'-fluoro uridine
  modified_base 11: mod_base = OTHER; note = 2'-fluoro guanosine
  modified_base 12: mod_base = OTHER; note = 2'O-methyl uridine
  modified_base 13: mod_base = OTHER; note = 2'O-methyl guanosine
  modified_base 14: mod_base = OTHER; note = 2'O-methyl guanosine
  modified_base 15: mod_base = OTHER; note = 2'O-methyl guanosine
  modified_base 16: mod_base = OTHER; note = 2'O-methyl adenosine
  modified_base 17: mod_base = OTHER; note = 2'O-methyl uridine
  modified_base 18: mod_base = OTHER; note = 2'O-methyl adenosine
  modified_base 19: mod_base = OTHER; note = 2'O-methyl uridine
  modified_base 20: mod_base = OTHER; note = 2'O-methyl uridine phosphorothioate
  modified_base 21: mod_base = OTHER; note = 2'O-methyl adenosine 6-(5-(((2R,3R,4R,5R,6R)-3-acetamido-4,5-dihydroxy-6-(hydrox ymethyl)tetrahydro-2H-pyran-2-yl)oxy)pentanamido)-N-(6-(4-( hydroxymethyl)-4-(methoxymethyl)piperidin-1-yl)-6-oxohexyl) hexanamide-phosphorothioate-6-(5-(((2R,3R,4R,5R,6R)-3-aceta mido-4,5-dihydroxy-6-(hydroxymethyl)tetrahydro-2H-pyran-2-y l)oxy)pentanamido)-N-(6-(4-(hydroxymethyl)-4-(methoxymethyl )piperidin-1-yl)-6-oxohexyl)hexanamide-phosphorothioate-6-( 5-(((2R,3R,4R,5R,6R)-3-acetamido-4,5-dihydroxy-6-(hydroxyme thyl)tetrahydro-2H-pyran-2-yl)oxy)pentanamido)-N-(6-(4-(hyd roxymethyl)-4-(methoxymethyl)piperidin-1-yl)-6-oxohexyl)hex anamide
tattggttctgtgggatatta

SEQ ID NO: 402 - RNA, 21 nt, synthetic construct
  source 1..21: mol_type = other RNA
  modified_base 1: mod_base = OTHER; note = 2'O-methyl cytidine phosphorothioate
  modified_base 2: mod_base = OTHER; note = 2'O-methyl uridine phosphorothioate
  modified_base 3: mod_base = OTHER; note = 2'O-methyl adenosine
  modified_base 4: mod_base = OTHER; note = 2'O-methyl guanosine
  modified_base 5: mod_base = OTHER; note = 2'O-methyl guanosine
  modified_base 6: mod_base = OTHER; note = 2'O-methyl adenosine
  modified_base 7: mod_base = OTHER; note = 2'-fluoro cytidine
  modified_base 8: mod_base = OTHER; note = 2'O-methyl adenosine
  modified_base 9: mod_base = OTHER; note = 2'-fluoro uridine
  modified_base 10: mod_base = OTHER; note = 2'-fluoro uridine
  modified_base 11: mod_base = OTHER; note = 2'-fluoro uridine
  modified_base 12: mod_base = OTHER; note = 2'O-methyl uridine
  modified_base 13: mod_base = OTHER; note = 2'O-methyl uridine
  modified_base 14: mod_base = OTHER; note = 2'O-methyl guanosine
  modified_base 15: mod_base = OTHER; note = 2'O-methyl guanosine
  modified_base 16: mod_base = OTHER; note = 2'O-methyl adenosine
  modified_base 17: mod_base = OTHER; note = 2'O-methyl uridine
  modified_base 18: mod_base = OTHER; note = 2'O-methyl cytidine
  modified_base 19: mod_base = OTHER; note = 2'O-methyl adenosine
  modified_base 20: mod_base = OTHER; note = 2'O-methyl cytidine phosphorothioate
  modified_base 21: mod_base = OTHER; note = 2'O-methyl adenosine 6-(5-(((2R,3R,4R,5R,6R)-3-acetamido-4,5-dihydroxy-6-(hydrox ymethyl)tetrahydro-2H-pyran-2-yl)oxy)pentanamido)-N-(6-(4-( hydroxymethyl)-4-(methoxymethyl)piperidin-1-yl)-6-oxohexyl) hexanamide-phosphorothioate-6-(5-(((2R,3R,4R,5R,6R)-3-aceta mido-4,5-dihydroxy-6-(hydroxymethyl)tetrahydro-2H-pyran-2-y l)oxy)pentanamido)-N-(6-(4-(hydroxymethyl)-4-(methoxymethyl )piperidin-1-yl)-6-oxohexyl)hexanamide-phosphorothioate-6-( 5-(((2R,3R,4R,5R,6R)-3-acetamido-4,5-dihydroxy-6-(hydroxyme thyl)tetrahydro-2H-pyran-2-yl)oxy)pentanamido)-N-(6-(4-(hyd roxymethyl)-4-(methoxymethyl)piperidin-1-yl)-6-oxohexyl)hex anamide
ctaggacatttttggatcaca

SEQ ID NO: 403 - RNA, 21 nt, synthetic construct
  source 1..21: mol_type = other RNA
  modified_base 1: mod_base = OTHER; note = 2'O-methyl uridine phosphorothioate
  modified_base 2: mod_base = OTHER; note = 2'O-methyl uridine phosphorothioate
  modified_base 3: mod_base = OTHER; note = 2'O-methyl guanosine
  modified_base 4: mod_base = OTHER; note = 2'O-methyl guanosine
  modified_base 5: mod_base = OTHER; note = 2'O-methyl guanosine
  modified_base 6: mod_base = OTHER; note = 2'O-methyl adenosine
  modified_base 7: mod_base = OTHER; note = 2'-fluoro adenosine
  modified_base 8: mod_base = OTHER; note = 2'O-methyl adenosine
  modified_base 9: mod_base = OTHER; note = 2'-fluoro adenosine
  modified_base 10: mod_base = OTHER; note = 2'-fluoro adenosine
  modified_base 11: mod_base = OTHER; note = 2'-fluoro cytidine
  modified_base 12: mod_base = OTHER; note = 2'O-methyl uridine
  modified_base 13: mod_base = OTHER; note = 2'O-methyl guanosine
  modified_base 14: mod_base = OTHER; note = 2'O-methyl guanosine
  modified_base 15: mod_base = OTHER; note = 2'O-methyl uridine
  modified_base 16: mod_base = OTHER; note = 2'O-methyl adenosine
  modified_base 17: mod_base = OTHER; note = 2'O-methyl uridine
  modified_base 18: mod_base = OTHER; note = 2'O-methyl cytidine
  modified_base 19: mod_base = OTHER; note = 2'O-methyl adenosine
  modified_base 20: mod_base = OTHER; note = 2'O-methyl adenosine phosphorothioate
  modified_base 21: mod_base = OTHER; note = 2'O-methyl adenosine 6-(5-(((2R,3R,4R,5R,6R)-3-acetamido-4,5-dihydroxy-6-(hydrox ymethyl)tetrahydro-2H-pyran-2-yl)oxy)pentanamido)-N-(6-(4-( hydroxymethyl)-4-(methoxymethyl)piperidin-1-yl)-6-oxohexyl) hexanamide-phosphorothioate-6-(5-(((2R,3R,4R,5R,6R)-3-aceta mido-4,5-dihydroxy-6-(hydroxymethyl)tetrahydro-2H-pyran-2-y l)oxy)pentanamido)-N-(6-(4-(hydroxymethyl)-4-(methoxymethyl )piperidin-1-yl)-6-oxohexyl)hexanamide-phosphorothioate-6-( 5-(((2R,3R,4R,5R,6R)-3-acetamido-4,5-dihydroxy-6-(hydroxyme thyl)tetrahydro-2H-pyran-2-yl)oxy)pentanamido)-N-(6-(4-(hyd roxymethyl)-4-(methoxymethyl)piperidin-1-yl)-6-oxohexyl)hex anamide
ttgggaaaaactggtatcaaa

SEQ ID NO: 404 - RNA, 21 nt, synthetic construct
  source 1..21: mol_type = other RNA
  modified_base 1: mod_base = OTHER; note = 2'O-methyl cytidine phosphorothioate
  modified_base 2: mod_base = OTHER; note = 2'O-methyl cytidine phosphorothioate
  modified_base 3: mod_base = OTHER; note = 2'O-methyl uridine
  modified_base 4: mod_base = OTHER; note = 2'O-methyl uridine
  modified_base 5: mod_base = OTHER; note = 2'O-methyl adenosine
  modified_base 6: mod_base = OTHER; note = 2'O-methyl cytidine
  modified_base 7: mod_base = OTHER; note = 2'-fluoro cytidine
  modified_base 8: mod_base = OTHER; note = 2'O-methyl uridine
  modified_base 9: mod_base = OTHER; note = 2'-fluoro cytidine
  modified_base 10: mod_base = OTHER; note = 2'-fluoro adenosine
  modified_base 11: mod_base = OTHER; note = 2'-fluoro uridine
  modified_base 12: mod_base = OTHER; note = 2'O-methyl cytidine
  modified_base 13: mod_base = OTHER; note = 2'O-methyl cytidine
  modified_base 14: mod_base = OTHER; note = 2'O-methyl cytidine
  modified_base 15: mod_base = OTHER; note = 2'O-methyl adenosine
  modified_base 16: mod_base = OTHER; note = 2'O-methyl uridine
  modified_base 17: mod_base = OTHER; note = 2'O-methyl adenosine
  modified_base 18: mod_base = OTHER; note = 2'O-methyl uridine
  modified_base 19: mod_base = OTHER; note = 2'O-methyl uridine
  modified_base 20: mod_base = OTHER; note = 2'O-methyl guanosine phosphorothioate
  modified_base 21: mod_base = OTHER; note = 2'O-methyl uridine
ccttacctcatcccatattgt

SEQ ID NO: 405 - RNA, 21 nt, synthetic construct
  source 1..21: mol_type = other RNA
  modified_base 1: mod_base = OTHER; note = 2'O-methyl cytidine phosphorothioate
  modified_base 2: mod_base = OTHER; note = 2'O-methyl cytidine phosphorothioate
  modified_base 3: mod_base = OTHER; note = 2'O-methyl cytidine
  modified_base 4: mod_base = OTHER; note = 2'O-methyl adenosine
  modified_base 5: mod_base = OTHER; note = 2'O-methyl uridine
  modified_base 6: mod_base = OTHER; note = 2'O-methyl adenosine
  modified_base 7: mod_base = OTHER; note = 2'-fluoro uridine
  modified_base 8: mod_base = OTHER; note = 2'O-methyl uridine
  modified_base 9: mod_base = OTHER; note = 2'-fluoro guanosine
  modified_base 10: mod_base = OTHER; note = 2'-fluoro uridine
  modified_base 11: mod_base = OTHER; note = 2'-fluoro uridine
  modified_base 12: mod_base = OTHER; note = 2'O-methyl cytidine
  modified_base 13: mod_base = OTHER; note = 2'O-methyl cytidine
  modified_base 14: mod_base = OTHER; note = 2'O-methyl adenosine
  modified_base 15: mod_base = OTHER; note = 2'O-methyl guanosine
  modified_base 16: mod_base = OTHER; note = 2'O-methyl cytidine
  modified_base 17: mod_base = OTHER; note = 2'O-methyl adenosine
  modified_base 18: mod_base = OTHER; note = 2'O-methyl adenosine
  modified_base 19: mod_base = OTHER; note = 2'O-methyl adenosine
  modified_base 20: mod_base = OTHER; note = 2'O-methyl uridine phosphorothioate
  modified_base 21: mod_base = OTHER; note = 2'O-methyl uridine
cccatattgttccagcaaatt

SEQ ID NO: 406 - RNA, 21 nt, synthetic construct
  source 1..21: mol_type = other RNA
  modified_base 1: mod_base = OTHER; note = 2'O-methyl cytidine phosphorothioate
  modified_base 2: mod_base = OTHER; note = 2'O-methyl cytidine phosphorothioate
  modified_base 3: mod_base = OTHER; note = 2'O-methyl uridine
  modified_base 4: mod_base = OTHER; note = 2'O-methyl uridine
  modified_base 5: mod_base = OTHER; note = 2'O-methyl guanosine
  modified_base 6: mod_base = OTHER; note = 2'O-methyl guanosine
  modified_base 7: mod_base = OTHER; note = 2'-fluoro guanosine
  modified_base 8: mod_base = OTHER; note = 2'O-methyl adenosine
  modified_base 9: mod_base = OTHER; note = 2'-fluoro adenosine
  modified_base 10: mod_base = OTHER; note = 2'-fluoro adenosine
  modified_base 11: mod_base = OTHER; note = 2'-fluoro adenosine
  modified_base 12: mod_base = OTHER; note = 2'O-methyl adenosine
  modified_base 13: mod_base = OTHER; note = 2'O-methyl cytidine
  modified_base 14: mod_base = OTHER; note = 2'O-methyl uridine
  modified_base 15: mod_base = OTHER; note = 2'O-methyl guanosine
  modified_base 16: mod_base = OTHER; note = 2'O-methyl guanosine
  modified_base 17: mod_base = OTHER; note = 2'O-methyl uridine
  modified_base 18: mod_base = OTHER; note = 2'O-methyl adenosine
  modified_base 19: mod_base = OTHER; note = 2'O-methyl uridine
  modified_base 20: mod_base = OTHER; note = 2'O-methyl cytidine phosphorothioate
  modified_base 21: mod_base = OTHER; note = 2'O-methyl adenosine
ccttgggaaaaactggtatca

SEQ ID NO: 407 - RNA, 21 nt, synthetic construct
  source 1..21: mol_type = other RNA
  modified_base 1: mod_base = OTHER; note = 2'O-methyl uridine phosphorothioate
  modified_base 2: mod_base = OTHER; note = 2'O-methyl guanosine phosphorothioate
  modified_base 3: mod_base = OTHER; note = 2'O-methyl guanosine
  modified_base 4: mod_base = OTHER; note = 2'O-methyl uridine
  modified_base 5: mod_base = OTHER; note = 2'O-methyl adenosine
  modified_base 6: mod_base = OTHER; note = 2'O-methyl uridine
  modified_base 7: mod_base = OTHER; note = 2'-fluoro cytidine
  modified_base 8: mod_base = OTHER; note = 2'O-methyl adenosine
  modified_base 9: mod_base = OTHER; note = 2'-fluoro adenosine
  modified_base 10: mod_base = OTHER; note = 2'-fluoro adenosine
  modified_base 11: mod_base = OTHER; note = 2'-fluoro adenosine
  modified_base 12: mod_base = OTHER; note = 2'O-methyl cytidine
  modified_base 13: mod_base = OTHER; note = 2'O-methyl cytidine
  modified_base 14: mod_base = OTHER; note = 2'O-methyl uridine
  modified_base 15: mod_base = OTHER; note = 2'O-methyl cytidine
  modified_base 16: mod_base = OTHER; note = 2'O-methyl adenosine
  modified_base 17: mod_base = OTHER; note = 2'O-methyl uridine
  modified_base 18: mod_base = OTHER; note = 2'O-methyl guanosine
  modified_base 19: mod_base = OTHER; note = 2'O-methyl uridine
  modified_base 20: mod_base = OTHER; note = 2'O-methyl cytidine phosphorothioate
  modified_base 21: mod_base = OTHER; note = 2'O-methyl uridine
tggtatcaaaacctcatgtct

SEQ ID NO: 408 - RNA, 21 nt, synthetic construct
  source 1..21: mol_type = other RNA
  modified_base 1: mod_base = OTHER; note = 2'O-methyl guanosine phosphorothioate
  modified_base 2: mod_base = OTHER; note = 2'O-methyl uridine phosphorothioate
  modified_base 3: mod_base = OTHER; note = 2'O-methyl adenosine
  modified_base 4: mod_base = OTHER; note = 2'O-methyl uridine
  modified_base 5: mod_base = OTHER; note = 2'O-methyl cytidine
  modified_base 6: mod_base = OTHER; note = 2'O-methyl adenosine
  modified_base 7: mod_base = OTHER; note = 2'-fluoro adenosine
  modified_base 8: mod_base = OTHER; note = 2'O-methyl adenosine
  modified_base 9: mod_base = OTHER; note = 2'-fluoro adenosine
  modified_base 10: mod_base = OTHER; note = 2'-fluoro cytidine
  modified_base 11: mod_base = OTHER; note = 2'-fluoro cytidine
  modified_base 12: mod_base = OTHER; note = 2'O-methyl uridine
  modified_base 13: mod_base = OTHER; note = 2'O-methyl cytidine
  modified_base 14: mod_base = OTHER; note = 2'O-methyl adenosine
  modified_base 15: mod_base = OTHER; note = 2'O-methyl uridine
  modified_base 16: mod_base = OTHER; note = 2'O-methyl guanosine
  modified_base 17: mod_base = OTHER; note = 2'O-methyl uridine
  modified_base 18: mod_base = OTHER; note = 2'O-methyl cytidine
  modified_base 19: mod_base = OTHER; note = 2'O-methyl uridine
  modified_base 20: mod_base = OTHER; note = 2'O-methyl cytidine phosphorothioate
  modified_base 21: mod_base = OTHER; note = 2'O-methyl uridine
gtatcaaaacctcatgtctct

SEQ ID NO: 409 - RNA, 21 nt, synthetic construct
  source 1..21: mol_type = other RNA
  modified_base 1: mod_base = OTHER; note = 2'O-methyl uridine phosphorothioate
  modified_base 2: mod_base = OTHER; note = 2'O-methyl uridine phosphorothioate
  modified_base 3: mod_base = OTHER; note = 2'O-methyl guanosine
  modified_base 4: mod_base = OTHER; note = 2'O-methyl uridine
  modified_base 5: mod_base = OTHER; note = 2'O-methyl guanosine
  modified_base 6: mod_base = OTHER; note = 2'O-methyl adenosine
  modified_base 7: mod_base = OTHER; note = 2'-fluoro adenosine
  modified_base 8: mod_base = OTHER; note = 2'O-methyl uridine
  modified_base 9: mod_base = OTHER; note = 2'-fluoro adenosine
  modified_base 10: mod_base = OTHER; note = 2'-fluoro cytidine
  modified_base 11: mod_base = OTHER; note = 2'-fluoro uridine
  modified_base 12: mod_base = OTHER; note = 2'O-methyl guanosine
  modified_base 13: mod_base = OTHER; note = 2'O-methyl guanosine
  modified_base 14: mod_base = OTHER; note = 2'O-methyl guanosine
  modified_base 15: mod_base = OTHER; note = 2'O-methyl uridine
  modified_base 16: mod_base = OTHER; note = 2'O-methyl uridine
  modified_base 17: mod_base = OTHER; note = 2'O-methyl cytidine
  modified_base 18: mod_base = OTHER; note = 2'O-methyl adenosine
  modified_base 19: mod_base = OTHER; note = 2'O-methyl cytidine
  modified_base 20: mod_base = OTHER; note = 2'O-methyl cytidine phosphorothioate
  modified_base 21: mod_base = OTHER; note = 2'O-methyl adenosine
ttgtgaatactgggttcacca

SEQ ID NO: 410 - RNA, 21 nt, synthetic construct
  source 1..21: mol_type = other RNA
  modified_base 1: mod_base = OTHER; note = 2'O-methyl uridine phosphorothioate
  modified_base 2: mod_base = OTHER; note = 2'O-methyl guanosine phosphorothioate
  modified_base 3: mod_base = OTHER; note = 2'O-methyl uridine
  modified_base 4: mod_base = OTHER; note = 2'O-methyl guanosine
  modified_base 5: mod_base = OTHER; note = 2'O-methyl adenosine
  modified_base 6: mod_base = OTHER; note = 2'O-methyl adenosine
  modified_base 7: mod_base = OTHER; note = 2'-fluoro uridine
  modified_base 8: mod_base = OTHER; note = 2'O-methyl adenosine
  modified_base 9: mod_base = OTHER; note = 2'-fluoro cytidine
  modified_base 10: mod_base = OTHER; note = 2'-fluoro uridine
  modified_base 11: mod_base = OTHER; note = 2'-fluoro guanosine
  modified_base 12: mod_base = OTHER; note = 2'O-methyl guanosine
  modified_base 13: mod_base = OTHER; note = 2'O-methyl guanosine
  modified_base 14: mod_base = OTHER; note = 2'O-methyl uridine
  modified_base 15: mod_base = OTHER; note = 2'O-methyl uridine
  modified_base 16: mod_base = OTHER; note = 2'O-methyl cytidine
  modified_base 17: mod_base = OTHER; note = 2'O-methyl adenosine
  modified_base 18: mod_base = OTHER; note = 2'O-methyl cytidine
  modified_base 19: mod_base = OTHER; note = 2'O-methyl cytidine
  modified_base 20: mod_base = OTHER; note = 2'O-methyl adenosine phosphorothioate
  modified_base 21: mod_base = OTHER; note = 2'O-methyl adenosine
tgtgaatactgggttcaccaa

SEQ ID NO: 411 - RNA, 21 nt, synthetic construct
  source 1..21: mol_type = other RNA
  modified_base 1: mod_base = OTHER; note = 2'O-methyl guanosine phosphorothioate
  modified_base 2: mod_base = OTHER; note = 2'O-methyl uridine phosphorothioate
  modified_base 3: mod_base = OTHER; note = 2'O-methyl guanosine
  modified_base 4: mod_base = OTHER; note = 2'O-methyl adenosine
  modified_base 5: mod_base = OTHER; note = 2'O-methyl adenosine
  modified_base 6: mod_base = OTHER; note = 2'O-methyl uridine
  modified_base 7: mod_base = OTHER; note = 2'-fluoro adenosine
  modified_base 8: mod_base = OTHER; note = 2'O-methyl cytidine
  modified_base 9: mod_base = OTHER; note = 2'-fluoro uridine
  modified_base 10: mod_base = OTHER; note = 2'-fluoro guanosine
  modified_base 11: mod_base = OTHER; note = 2'-fluoro guanosine
  modified_base 12: mod_base = OTHER; note = 2'O-methyl guanosine
  modified_base 13: mod_base = OTHER; note = 2'O-methyl uridine
  modified_base 14: mod_base = OTHER; note = 2'O-methyl uridine
  modified_base 15: mod_base = OTHER; note = 2'O-methyl cytidine
  modified_base 16: mod_base = OTHER; note = 2'O-methyl adenosine
  modified_base 17: mod_base = OTHER; note = 2'O-methyl cytidine
  modified_base 18: mod_base = OTHER; note = 2'O-methyl cytidine
  modified_base 19: mod_base = OTHER; note = 2'O-methyl adenosine
  modified_base 20: mod_base = OTHER; note = 2'O-methyl adenosine phosphorothioate
  modified_base 21: mod_base = OTHER; note = 2'O-methyl adenosine
gtgaatactgggttcaccaaa

SEQ ID NO: 412 - RNA, 21 nt, synthetic construct
  source 1..21: mol_type = other RNA
  modified_base 1: mod_base = OTHER; note = 2'O-methyl uridine phosphorothioate
  modified_base 2: mod_base = OTHER; note = 2'O-methyl guanosine phosphorothioate
  modified_base 3: mod_base = OTHER; note = 2'O-methyl adenosine
  modified_base 4: mod_base = OTHER; note = 2'O-methyl adenosine
  modified_base 5: mod_base = OTHER; note = 2'O-methyl uridine
  modified_base 6: mod_base = OTHER; note = 2'O-methyl adenosine
  modified_base 7: mod_base = OTHER; note = 2'-fluoro cytidine
  modified_base 8: mod_base = OTHER; note = 2'O-methyl uridine
  modified_base 9: mod_base = OTHER; note = 2'-fluoro guanosine
  modified_base 10: mod_base = OTHER; note = 2'-fluoro guanosine
  modified_base 11: mod_base = OTHER; note = 2'-fluoro guanosine
  modified_base 12: mod_base = OTHER; note = 2'O-methyl uridine
  modified_base 13: mod_base = OTHER; note = 2'O-methyl uridine
  modified_base 14: mod_base = OTHER; note = 2'O-methyl cytidine
  modified_base 15: mod_base = OTHER; note = 2'O-methyl adenosine
  modified_base 16: mod_base = OTHER; note = 2'O-methyl cytidine
  modified_base 17: mod_base = OTHER; note = 2'O-methyl cytidine
  modified_base 18: mod_base = OTHER; note = 2'O-methyl adenosine
  modified_base 19: mod_base = OTHER; note = 2'O-methyl adenosine
  modified_base 20: mod_base = OTHER; note = 2'O-methyl adenosine phosphorothioate
  modified_base 21: mod_base = OTHER; note = 2'O-methyl adenosine
tgaatactgggttcaccaaaa

SEQ ID NO: 413 - RNA, 21 nt, synthetic construct
  source 1..21: mol_type = other RNA
  modified_base 1: mod_base = OTHER; note = 2'O-methyl cytidine phosphorothioate
  modified_base 2: mod_base = OTHER; note = 2'O-methyl cytidine phosphorothioate
  modified_base 3: mod_base = OTHER; note = 2'O-methyl adenosine
  modified_base 4: mod_base = OTHER; note = 2'O-methyl adenosine
  modified_base 5: mod_base = OTHER; note = 2'O-methyl adenosine
  modified_base 6: mod_base = OTHER; note = 2'O-methyl adenosine
  modified_base 7: mod_base = OTHER; note = 2'-fluoro adenosine
  modified_base 8: mod_base = OTHER; note = 2'O-methyl uridine
  modified_base 9: mod_base = OTHER; note = 2'-fluoro cytidine
  modified_base 10: mod_base = OTHER; note = 2'-fluoro cytidine
  modified_base 11: mod_base = OTHER; note = 2'-fluoro adenosine
  modified_base 12: mod_base = OTHER; note = 2'O-methyl adenosine
  modified_base 13: mod_base = OTHER; note = 2'O-methyl guanosine
  modified_base 14: mod_base = OTHER; note = 2'O-methyl cytidine
  modified_base 15: mod_base = OTHER; note = 2'O-methyl adenosine
  modified_base 16: mod_base = OTHER; note = 2'O-methyl cytidine
  modified_base 17: mod_base = OTHER; note = 2'O-methyl adenosine
  modified_base 18: mod_base = OTHER; note = 2'O-methyl adenosine
  modified_base 19: mod_base = OTHER; note = 2'O-methyl guanosine
  modified_base 20: mod_base = OTHER; note = 2'O-methyl adenosine phosphorothioate
  modified_base 21: mod_base = OTHER; note = 2'O-methyl uridine
ccaaaaatccaagcacaagat

SEQ ID NO: 414 - RNA, 21 nt, synthetic construct
  source 1..21: mol_type = other RNA
  modified_base 1: mod_base = OTHER; note = 2'O-methyl guanosine phosphorothioate
  modified_base 2: mod_base = OTHER; note = 2'O-methyl guanosine phosphorothioate
  modified_base 3: mod_base = OTHER; note = 2'O-methyl adenosine
  modified_base 4: mod_base = OTHER; note = 2'O-methyl adenosine
  modified_base 5: mod_base = OTHER; note = 2'O-methyl uridine
  modified_base 6: mod_base = OTHER; note = 2'O-methyl adenosine
  modified_base 7: mod_base = OTHER; note = 2'-fluoro cytidine
  modified_base 8: mod_base = OTHER; note = 2'O-methyl uridine
  modified_base 9: mod_base = OTHER; note = 2'-fluoro uridine
  modified_base 10: mod_base = OTHER; note = 2'-fluoro adenosine
  modified_base 11: mod_base = OTHER; note = 2'-fluoro cytidine
  modified_base 12: mod_base = OTHER; note = 2'O-methyl cytidine
  modified_base 13: mod_base = OTHER; note = 2'O-methyl adenosine
  modified_base 14: mod_base = OTHER; note = 2'O-methyl adenosine
  modified_base 15: mod_base = OTHER; note = 2'O-methyl uridine
  modified_base 16: mod_base = OTHER; note = 2'O-methyl adenosine
  modified_base 17: mod_base = OTHER; note = 2'O-methyl adenosine
  modified_base 18: mod_base = OTHER; note = 2'O-methyl guanosine
  modified_base 19: mod_base = OTHER; note = 2'O-methyl adenosine
  modified_base 20: mod_base = OTHER; note = 2'O-methyl adenosine phosphorothioate
  modified_base 21: mod_base = OTHER; note = 2'O-methyl adenosine
ggaatacttaccaataagaaa

SEQ ID NO: 415 - RNA, 21 nt, synthetic construct
  source 1..21: mol_type = other RNA
  modified_base 1: mod_base = OTHER; note = 2'O-methyl uridine phosphorothioate
  modified_base 2: mod_base = OTHER; note = 2'O-methyl adenosine phosphorothioate
  modified_base 3: mod_base = OTHER; note = 2'O-methyl guanosine
  modified_base 4: mod_base = OTHER; note = 2'O-methyl guanosine
  modified_base 5: mod_base = OTHER; note = 2'O-methyl adenosine
  modified_base 6: mod_base = OTHER; note = 2'O-methyl cytidine
  modified_base 7: mod_base = OTHER; note = 2'-fluoro adenosine
  modified_base 8: mod_base = OTHER; note = 2'O-methyl uridine
  modified_base 9: mod_base = OTHER; note = 2'-fluoro uridine
  modified_base 10: mod_base = OTHER; note = 2'-fluoro uridine
  modified_base 11: mod_base = OTHER; note = 2'-fluoro uridine
  modified_base 12: mod_base = OTHER; note = 2'O-methyl uridine
  modified_base 13: mod_base = OTHER; note = 2'O-methyl guanosine
  modified_base 14: mod_base = OTHER; note = 2'O-methyl guanosine
  modified_base 15: mod_base = OTHER; note = 2'O-methyl adenosine
  modified_base 16: mod_base = OTHER; note = 2'O-methyl uridine
  modified_base 17: mod_base = OTHER; note = 2'O-methyl cytidine
  modified_base 18: mod_base = OTHER; note = 2'O-methyl adenosine
  modified_base 19: mod_base = OTHER; note = 2'O-methyl cytidine
  modified_base 20: mod_base = OTHER; note = 2'O-methyl adenosine phosphorothioate
  modified_base 21: mod_base = OTHER; note = 2'O-methyl adenosine
taggacatttttggatcacaa

SEQ ID NO: 416 - RNA, 21 nt, synthetic construct
  source 1..21: mol_type = other RNA
  modified_base 1: mod_base = OTHER; note = 2'O-methyl cytidine phosphorothioate
  modified_base 2: mod_base = OTHER; note = 2'O-methyl uridine phosphorothioate
  modified_base 3: mod_base = OTHER; note = 2'O-methyl uridine
  modified_base 4: mod_base = OTHER; note = 2'O-methyl guanosine
  modified_base 5: mod_base = OTHER; note = 2'O-methyl guanosine
  modified_base 6: mod_base = OTHER; note = 2'O-methyl adenosine
  modified_base 7: mod_base = OTHER; note = 2'-fluoro guanosine
  modified_base 8: mod_base = OTHER; note = 2'O-methyl uridine
  modified_base 9: mod_base = OTHER; note = 2'-fluoro cytidine
  modified_base 10: mod_base = OTHER; note = 2'-fluoro guanosine
  modified_base 11: mod_base = OTHER; note = 2'-fluoro uridine
  modified_base 12: mod_base = OTHER; note = 2'O-methyl uridine
  modified_base 13: mod_base = OTHER; note = 2'O-methyl guanosine
  modified_base 14: mod_base = OTHER; note = 2'O-methyl guanosine
  modified_base 15: mod_base = OTHER; note = 2'O-methyl uridine
  modified_base 16: mod_base = OTHER; note = 2'O-methyl guanosine
  modified_base 17: mod_base = OTHER; note = 2'O-methyl adenosine
  modified_base 18: mod_base = OTHER; note = 2'O-methyl adenosine
  modified_base 19: mod_base = OTHER; note = 2'O-methyl guanosine
  modified_base 20: mod_base = OTHER; note = 2'O-methyl uridine phosphorothioate
  modified_base 21: mod_base = OTHER; note = 2'O-methyl uridine
cttggagtcgttggtgaagtt

SEQ ID NO: 417 - RNA, 21 nt, synthetic construct
  source 1..21: mol_type = other RNA
  modified_base 1: mod_base = OTHER; note = 2'O-methyl uridine phosphorothioate
  modified_base 2: mod_base = OTHER; note = 2'O-methyl guanosine phosphorothioate
  modified_base 3: mod_base = OTHER; note = 2'O-methyl guanosine
  modified_base 4: mod_base = OTHER; note = 2'O-methyl adenosine
  modified_base 5: mod_base = OTHER; note = 2'O-methyl guanosine
  modified_base 6: mod_base = OTHER; note = 2'O-methyl uridine
  modified_base 7: mod_base = OTHER; note = 2'-fluoro cytidine
  modified_base 8: mod_base = OTHER; note = 2'O-methyl guanosine
  modified_base 9: mod_base = OTHER; note = 2'-fluoro uridine
  modified_base 10: mod_base = OTHER; note = 2'-fluoro uridine
  modified_base 11: mod_base = OTHER; note = 2'-fluoro guanosine
  modified_base 12: mod_base = OTHER; note = 2'O-methyl guanosine
  modified_base 13: mod_base = OTHER; note = 2'O-methyl uridine
  modified_base 14: mod_base = OTHER; note = 2'O-methyl guanosine
  modified_base 15: mod_base = OTHER; note = 2'O-methyl adenosine
  modified_base 16: mod_base = OTHER; note = 2'O-methyl adenosine
  modified_base 17: mod_base = OTHER; note = 2'O-methyl guanosine
  modified_base 18: mod_base = OTHER; note = 2'O-methyl uridine
  modified_base 19: mod_base = OTHER; note = 2'O-methyl uridine
  modified_base 20: mod_base = OTHER; note = 2'O-methyl uridine phosphorothioate
  modified_base 21: mod_base = OTHER; note = 2'O-methyl uridine
tggagtcgttggtgaagtttt

SEQ ID NO: 418 - RNA, 21 nt, synthetic construct
  source 1..21: mol_type = other RNA
  modified_base 1: mod_base = OTHER; note = 2'O-methyl uridine phosphorothioate
  modified_base 2: mod_base = OTHER; note = 2'O-methyl uridine phosphorothioate
  modified_base 3: mod_base = OTHER; note = 2'O-methyl guanosine
  modified_base 4: mod_base = OTHER; note = 2'O-methyl guanosine
  modified_base 5: mod_base = OTHER; note = 2'O-methyl uridine
  modified_base 6: mod_base = OTHER; note = 2'O-methyl guanosine
  modified_base 7: mod_base = OTHER; note = 2'-fluoro adenosine
  modified_base 8: mod_base = OTHER; note = 2'O-methyl adenosine
  modified_base 9: mod_base = OTHER; note = 2'-fluoro guanosine
  modified_base 10: mod_base = OTHER; note = 2'-fluoro uridine
  modified_base 11: mod_base = OTHER; note = 2'-fluoro uridine
  modified_base 12: mod_base = OTHER; note = 2'O-methyl uridine
  modified_base 13: mod_base = OTHER; note = 2'O-methyl uridine
  modified_base 14: mod_base = OTHER; note = 2'O-methyl uridine
  modified_base 15: mod_base = OTHER; note = 2'O-methyl cytidine
  modified_base 16: mod_base = OTHER; note = 2'O-methyl adenosine
  modified_base 17: mod_base = OTHER; note = 2'O-methyl uridine
  modified_base 18: mod_base = OTHER; note = 2'O-methyl uridine
  modified_base 19: mod_base = OTHER; note = 2'O-methyl cytidine
  modified_base 20: mod_base = OTHER; note = 2'O-methyl cytidine phosphorothioate
  modified_base 21: mod_base = OTHER; note = 2'O-methyl uridine
ttggtgaagtttttcattcct

SEQ ID NO: 419 - RNA, 21 nt, synthetic construct
  source 1..21: mol_type = other RNA
  modified_base 1: mod_base = OTHER; note = 2'O-methyl guanosine phosphorothioate
  modified_base 2: mod_base = OTHER; note = 2'O-methyl guanosine phosphorothioate
  modified_base 3: mod_base = OTHER; note = 2'O-methyl uridine
  modified_base 4: mod_base = OTHER; note = 2'O-methyl guanosine
  modified_base 5: mod_base = OTHER; note = 2'O-methyl adenosine
  modified_base 6: mod_base = OTHER; note = 2'O-methyl adenosine
  modified_base 7: mod_base = OTHER; note = 2'-fluoro guanosine
  modified_base 8: mod_base = OTHER; note = 2'O-methyl uridine
  modified_base 9: mod_base = OTHER; note = 2'-fluoro uridine
  modified_base 10: mod_base = OTHER; note = 2'-fluoro uridine
  modified_base 11: mod_base = OTHER; note = 2'-fluoro uridine
  modified_base 12: mod_base = OTHER; note = 2'O-methyl uridine
  modified_base 13: mod_base = OTHER; note = 2'O-methyl cytidine
  modified_base 14: mod_base = OTHER; note = 2'O-methyl adenosine
  modified_base 15: mod_base = OTHER; note = 2'O-methyl uridine
  modified_base 16: mod_base = OTHER; note = 2'O-methyl uridine
  modified_base 17: mod_base = OTHER; note = 2'O-methyl cytidine
  modified_base 18: mod_base = OTHER; note = 2'O-methyl cytidine
  modified_base 19: mod_base = OTHER; note = 2'O-methyl uridine
  modified_base 20: mod_base = OTHER; note = 2'O-methyl cytidine phosphorothioate
  modified_base 21: mod_base = OTHER; note = 2'O-methyl adenosine
ggtgaagtttttcattcctca

SEQ ID NO: 420 - RNA, 21 nt, synthetic construct
  source 1..21: mol_type = other RNA
  modified_base 1: mod_base = OTHER; note = 2'O-methyl guanosine phosphorothioate
  modified_base 2: mod_base = OTHER; note = 2'O-methyl guanosine phosphorothioate
  modified_base 3: mod_base = OTHER; note = 2'O-methyl cytidine
  modified_base 4: mod_base = OTHER; note = 2'O-methyl adenosine
  modified_base 5: mod_base = OTHER; note = 2'O-methyl guanosine
  modified_base 6: mod_base = OTHER; note = 2'O-methyl guanosine
  modified_base 7: mod_base = OTHER; note = 2'-fluoro cytidine
  modified_base 8: mod_base = OTHER; note = 2'O-methyl adenosine
  modified_base 9: mod_base = OTHER; note = 2'-fluoro guanosine
  modified_base 10: mod_base = OTHER; note = 2'-fluoro adenosine
  modified_base 11: mod_base = OTHER; note = 2'-fluoro cytidine
  modified_base 12: mod_base = OTHER; note = 2'O-methyl uridine
  modified_base 13: mod_base = OTHER; note = 2'O-methyl adenosine
  modified_base 14: mod_base = OTHER; note = 2'O-methyl cytidine
  modified_base 15: mod_base = OTHER; note = 2'O-methyl uridine
  modified_base 16: mod_base = OTHER; note = 2'O-methyl uridine
  modified_base 17: mod_base = OTHER; note = 2'O-methyl adenosine
  modified_base 18: mod_base = OTHER; note = 2'O-methyl uridine
  modified_base 19: mod_base = OTHER; note = 2'O-methyl guanosine
  modified_base 20: mod_base = OTHER; note = 2'O-methyl adenosine phosphorothioate
  modified_base 21: mod_base = OTHER; note = 2'O-methyl adenosine
ggcaggcagactacttatgaa

SEQ ID NO: 421 - RNA, 21 nt, synthetic construct
  source 1..21: mol_type = other RNA
  modified_base 1: mod_base = OTHER; note = 2'O-methyl uridine phosphorothioate
  modified_base 2: mod_base = OTHER; note = 2'O-methyl adenosine phosphorothioate
  modified_base 3: mod_base = OTHER; note = 2'O-methyl uridine
  modified_base 4: mod_base = OTHER; note = 2'O-methyl uridine
  modified_base 5: mod_base = OTHER; note = 2'O-methyl guanosine
  modified_base 6: mod_base = OTHER; note = 2'O-methyl guanosine
  modified_base 7: mod_base = OTHER; note = 2'-fluoro uridine
  modified_base 8: mod_base = OTHER; note = 2'O-methyl uridine
  modified_base 9: mod_base = OTHER; note = 2'-fluoro cytidine
  modified_base 10: mod_base = OTHER; note = 2'-fluoro uridine
  modified_base 11: mod_base = OTHER; note = 2'-fluoro guanosine
  modified_base 12: mod_base = OTHER; note = 2'O-methyl uridine
  modified_base 13: mod_base = OTHER; note = 2'O-methyl guanosine
  modified_base 14: mod_base = OTHER; note = 2'O-methyl guanosine
  modified_base 15: mod_base = OTHER; note = 2'O-methyl guanosine
  modified_base 16: mod_base = OTHER; note = 2'O-methyl adenosine
  modified_base 17: mod_base = OTHER; note = 2'O-methyl uridine
  modified_base 18: mod_base = OTHER; note = 2'O-methyl adenosine
  modified_base 19: mod_base = OTHER; note = 2'O-methyl uridine
  modified_base 20: mod_base = OTHER; note = 2'O-methyl uridine phosphorothioate
  modified_base 21: mod_base = OTHER; note = 2'O-methyl adenosine
tattggttctgtgggatatta

SEQ ID NO: 422 - RNA, 21 nt, synthetic construct
  source 1..21: mol_type = other RNA
  modified_base 1: mod_base = OTHER; note = 2'O-methyl guanosine phosphorothioate
  modified_base 2: mod_base = OTHER; note = 2'O-methyl guanosine phosphorothioate
  modified_base 3: mod_base = OTHER; note = 2'O-methyl uridine
  modified_base 4: mod_base = OTHER; note = 2'O-methyl uridine
  modified_base 5: mod_base = OTHER; note = 2'O-methyl cytidine
  modified_base 6: mod_base = OTHER; note = 2'O-methyl uridine
  modified_base 7: mod_base = OTHER; note = 2'-fluoro guanosine
  modified_base 8: mod_base = OTHER; note = 2'O-methyl uridine
  modified_base 9: mod_base = OTHER; note = 2'-fluoro guanosine
  modified_base 10: mod_base = OTHER; note = 2'-fluoro guanosine
  modified_base 11: mod_base = OTHER; note = 2'-fluoro guanosine
  modified_base 12: mod_base = OTHER; note = 2'O-methyl adenosine
  modified_base 13: mod_base = OTHER; note = 2'O-methyl uridine
  modified_base 14: mod_base = OTHER; note = 2'O-methyl adenosine
  modified_base 15: mod_base = OTHER; note = 2'O-methyl uridine
  modified_base 16: mod_base = OTHER; note = 2'O-methyl uridine
  modified_base 17: mod_base = OTHER; note = 2'O-methyl adenosine
  modified_base 18: mod_base = OTHER; note = 2'O-methyl adenosine
  modified_base 19: mod_base = OTHER; note = 2'O-methyl uridine
  modified_base 20: mod_base = OTHER; note = 2'O-methyl adenosine phosphorothioate
  modified_base 21: mod_base = OTHER; note = 2'O-methyl adenosine
ggttctgtgggatattaataa

SEQ ID NO: 423 - RNA, 21 nt, synthetic construct
  source 1..21: mol_type = other RNA
  modified_base 1: mod_base = OTHER; note = 2'O-methyl cytidine phosphorothioate
  modified_base 2: mod_base = OTHER; note = 2'O-methyl cytidine phosphorothioate
  modified_base 3: mod_base = OTHER; note = 2'O-methyl adenosine
  modified_base 4: mod_base = OTHER; note = 2'O-methyl adenosine
  modified_base 5: mod_base = OTHER; note = 2'O-methyl guanosine
  modified_base 6: mod_base = OTHER; note = 2'O-methyl guanosine
  modified_base 7: mod_base = OTHER; note = 2'-fluoro adenosine
  modified_base 8: mod_base = OTHER; note = 2'O-methyl uridine
  modified_base 9: mod_base = OTHER; note = 2'-fluoro guanosine
  modified_base 10: mod_base = OTHER; note = 2'-fluoro adenosine
  modified_base 11: mod_base = OTHER; note = 2'-fluoro adenosine
  modified_base 12: mod_base = OTHER; note = 2'O-methyl guanosine
  modified_base 13: mod_base = OTHER; note = 2'O-methyl adenosine
  modified_base 14: mod_base = OTHER; note = 2'O-methyl guanosine
  modified_base 15: mod_base = OTHER; note = 2'O-methyl adenosine
  modified_base 16: mod_base = OTHER; note = 2'O-methyl uridine
  modified_base 17: mod_base = OTHER; note = 2'O-methyl uridine
  modified_base 18: mod_base = OTHER; note = 2'O-methyl adenosine
  modified_base 19: mod_base = OTHER; note = 2'O-methyl cytidine
  modified_base 20: mod_base = OTHER; note = 2'O-methyl cytidine phosphorothioate
  modified_base 21: mod_base = OTHER; note = 2'O-methyl adenosine
ccaaggatgaagagattacca

SEQ ID NO: 424 - RNA, 21 nt, synthetic construct
  source 1..21: mol_type = other RNA
  modified_base 1: mod_base = OTHER; note = 2'O-methyl guanosine phosphorothioate
  modified_base 2: mod_base = OTHER; note = 2'O-methyl adenosine phosphorothioate
  modified_base 3: mod_base = OTHER; note = 2'O-methyl adenosine
  modified_base 4: mod_base = OTHER; note = 2'O-methyl guanosine
  modified_base 5: mod_base = OTHER; note = 2'O-methyl adenosine
  modified_base 6: mod_base = OTHER; note = 2'O-methyl guanosine
  modified_base 7: mod_base = OTHER; note = 2'-fluoro adenosine
  modified_base 8: mod_base = OTHER; note = 2'O-methyl uridine
  modified_base 9: mod_base = OTHER; note = 2'-fluoro uridine
  modified_base 10: mod_base = OTHER; note = 2'-fluoro adenosine
  modified_base 11: mod_base = OTHER; note = 2'-fluoro cytidine
  modified_base 12: mod_base = OTHER; note = 2'O-methyl cytidine
  modified_base 13: mod_base = OTHER; note = 2'O-methyl adenosine
  modified_base 14: mod_base = OTHER; note = 2'O-methyl adenosine
  modified_base 15: mod_base = OTHER; note = 2'O-methyl guanosine
  modified_base 16: mod_base = OTHER; note = 2'O-methyl adenosine
  modified_base 17: mod_base = OTHER; note = 2'O-methyl cytidine
  modified_base 18: mod_base = OTHER; note = 2'O-methyl adenosine
  modified_base 19: mod_base = OTHER; note = 2'O-methyl uridine
  modified_base 20: mod_base = OTHER; note = 2'O-methyl uridine phosphorothioate
  modified_base 21: mod_base = OTHER; note = 2'O-methyl uridine
gaagagattaccaagacattt

SEQ ID NO: 425 - RNA, 21 nt, synthetic construct
  source 1..21: mol_type = other RNA
  modified_base 1: mod_base = OTHER; note = 2'O-methyl adenosine phosphorothioate
  modified_base 2: mod_base = OTHER; note = 2'O-methyl guanosine phosphorothioate
  modified_base 3: mod_base = OTHER; note = 2'O-methyl adenosine
  modified_base 4: mod_base = OTHER; note = 2'O-methyl guanosine
  modified_base 5: mod_base = OTHER; note = 2'O-methyl adenosine
  modified_base 6: mod_base = OTHER; note = 2'O-methyl uridine
  modified_base 7: mod_base = OTHER; note = 2'-fluoro uridine
  modified_base 8: mod_base = OTHER; note = 2'O-methyl adenosine
  modified_base 9: mod_base = OTHER; note = 2'-fluoro cytidine
  modified_base 10: mod_base = OTHER; note = 2'-fluoro cytidine
  modified_base 11: mod_base = OTHER; note = 2'-fluoro adenosine
  modified_base 12: mod_base = OTHER; note = 2'O-methyl adenosine
  modified_base 13: mod_base = OTHER; note = 2'O-methyl guanosine
  modified_base 14: mod_base = OTHER; note = 2'O-methyl adenosine
  modified_base 15: mod_base = OTHER; note = 2'O-methyl cytidine
  modified_base 16: mod_base = OTHER; note = 2'O-methyl adenosine
  modified_base 17: mod_base = OTHER; note = 2'O-methyl uridine
  modified_base 18: mod_base = OTHER; note = 2'O-methyl uridine
  modified_base 19: mod_base = OTHER; note = 2'O-methyl uridine
  modified_base 20: mod_base = OTHER; note = 2'O-methyl guanosine phosphorothioate
  modified_base 21: mod_base = OTHER; note = 2'O-methyl adenosine
agagattaccaagacatttga

SEQ ID NO: 426 - RNA, 21 nt, synthetic construct
  source 1..21: mol_type = other RNA
  modified_base 1: mod_base = OTHER; note = 2'O-methyl guanosine phosphorothioate
  modified_base 2: mod_base = OTHER; note = 2'O-methyl adenosine phosphorothioate
  modified_base 3: mod_base = OTHER; note = 2'O-methyl uridine
  modified_base 4: mod_base = OTHER; note = 2'O-methyl uridine
  modified_base 5: mod_base = OTHER; note = 2'O-methyl adenosine
  modified_base 6: mod_base = OTHER; note = 2'O-methyl cytidine
  modified_base 7: mod_base = OTHER; note = 2'-fluoro cytidine
  modified_base 8: mod_base = OTHER; note = 2'O-methyl adenosine
  modified_base 9: mod_base = OTHER; note = 2'-fluoro adenosine
  modified_base 10: mod_base = OTHER; note = 2'-fluoro guanosine
  modified_base 11: mod_base = OTHER; note = 2'-fluoro adenosine
  modified_base 12: mod_base = OTHER; note = 2'O-methyl cytidine
  modified_base 13: mod_base = OTHER; note = 2'O-methyl adenosine
  modified_base 14: mod_base = OTHER; note = 2'O-methyl uridine
  modified_base 15: mod_base = OTHER; note = 2'O-methyl uridine
  modified_base 16: mod_base = OTHER; note = 2'O-methyl uridine
  modified_base 17: mod_base = OTHER; note = 2'O-methyl guanosine
  modified_base 18: mod_base = OTHER; note = 2'O-methyl adenosine
  modified_base 19: mod_base = OTHER; note = 2'O-methyl guanosine
  modified_base 20: mod_base = OTHER; note = 2'O-methyl guanosine phosphorothioate
  modified_base 21: mod_base = OTHER; note = 2'O-methyl uridine
gattaccaagacatttgaggt

SEQ ID NO: 427 - RNA, 21 nt, synthetic construct
  source 1..21: mol_type = other RNA
  modified_base 1: mod_base = OTHER; note = 2'O-methyl uridine phosphorothioate
  modified_base 2: mod_base = OTHER; note = 2'O-methyl adenosine phosphorothioate
  modified_base 3: mod_base = OTHER; note = 2'O-methyl cytidine
  modified_base 4: mod_base = OTHER; note = 2'O-methyl cytidine
  modified_base 5: mod_base = OTHER; note = 2'O-methyl adenosine
  modified_base 6: mod_base = OTHER; note = 2'O-methyl adenosine
  modified_base 7: mod_base = OTHER; note = 2'-fluoro guanosine
  modified_base 8: mod_base = OTHER; note = 2'O-methyl adenosine
  modified_base 9: mod_base = OTHER; note = 2'-fluoro cytidine
  modified_base 10: mod_base = OTHER; note = 2'-fluoro adenosine
  modified_base 11: mod_base = OTHER; note = 2'-fluoro uridine
  modified_base 12: mod_base = OTHER; note = 2'O-methyl uridine
  modified_base 13: mod_base = OTHER; note = 2'O-methyl uridine
  modified_base 14: mod_base = OTHER; note = 2'O-methyl guanosine
  modified_base 15: mod_base = OTHER; note = 2'O-methyl adenosine
  modified_base 16: mod_base = OTHER; note = 2'O-methyl guanosine
  modified_base 17: mod_base = OTHER; note = 2'O-methyl guanosine
  modified_base 18: mod_base = OTHER; note = 2'O-methyl uridine
  modified_base 19: mod_base = OTHER; note = 2'O-methyl cytidine
  modified_base 20: mod_base = OTHER; note = 2'O-methyl adenosine phosphorothioate
  modified_base 21: mod_base = OTHER; note = 2'O-methyl adenosine
taccaagacatttgaggtcaa

SEQ ID NO: 428 - RNA, 21 nt, synthetic construct
  source 1..21: mol_type = other RNA
  modified_base 1: mod_base = OTHER; note = 2'O-methyl uridine phosphorothioate
  modified_base 2: mod_base = OTHER; note = 2'O-methyl cytidine phosphorothioate
  modified_base 3: mod_base = OTHER; note = 2'O-methyl cytidine
  modified_base 4: mod_base = OTHER; note = 2'O-methyl uridine
  modified_base 5: mod_base = OTHER; note = 2'O-methyl adenosine
  modified_base 6: mod_base = OTHER; note = 2'O-methyl guanosine
  modified_base 7: mod_base = OTHER; note = 2'-fluoro guanosine
  modified_base 8: mod_base = OTHER; note = 2'O-methyl adenosine
  modified_base 9: mod_base = OTHER; note = 2'-fluoro cytidine
  modified_base 10: mod_base = OTHER; note = 2'-fluoro adenosine
  modified_base 11: mod_base = OTHER; note = 2'-fluoro uridine
  modified_base 12: mod_base = OTHER; note = 2'O-methyl uridine
  modified_base 13: mod_base = OTHER; note = 2'O-methyl uridine
  modified_base 14: mod_base = OTHER; note = 2'O-methyl uridine
  modified_base 15: mod_base = OTHER; note = 2'O-methyl uridine
  modified_base 16: mod_base = OTHER; note = 2'O-methyl guanosine
  modified_base 17: mod_base = OTHER; note = 2'O-methyl guanosine
  modified_base 18: mod_base = OTHER; note = 2'O-methyl adenosine
  modified_base 19: mod_base = OTHER; note = 2'O-methyl uridine
  modified_base 20: mod_base = OTHER; note = 2'O-methyl cytidine phosphorothioate
  modified_base 21: mod_base = OTHER; note = 2'O-methyl adenosine
tcctaggacatttttggatca

SEQ ID NO: 429 - RNA, 21 nt, synthetic construct
  source 1..21: mol_type = other RNA
  modified_base 1: mod_base = OTHER; note = 2'O-methyl cytidine phosphorothioate
  modified_base 2: mod_base = OTHER; note = 2'O-methyl uridine phosphorothioate
  modified_base 3: mod_base = OTHER; note = 2'O-methyl adenosine
  modified_base 4: mod_base = OTHER; note = 2'O-methyl guanosine
  modified_base 5: mod_base = OTHER; note = 2'O-methyl guanosine
  modified_base 6: mod_base = OTHER; note = 2'O-methyl adenosine
  modified_base 7: mod_base = OTHER; note = 2'-fluoro cytidine
  modified_base 8: mod_base = OTHER; note = 2'O-methyl adenosine
  modified_base 9: mod_base = OTHER; note = 2'-fluoro uridine
  modified_base 10: mod_base = OTHER; note = 2'-fluoro uridine
  modified_base 11: mod_base = OTHER; note = 2'-fluoro uridine
  modified_base 12: mod_base = OTHER; note = 2'O-methyl uridine
  modified_base 13: mod_base = OTHER; note = 2'O-methyl uridine
  modified_base 14: mod_base = OTHER; note = 2'O-methyl guanosine
  modified_base 15: mod_base = OTHER; note = 2'O-methyl guanosine
  modified_base 16: mod_base = OTHER; note = 2'O-methyl adenosine
  modified_base 17: mod_base = OTHER; note = 2'O-methyl uridine
  modified_base 18: mod_base = OTHER; note = 2'O-methyl cytidine
  modified_base 19: mod_base = OTHER; note = 2'O-methyl adenosine
  modified_base 20: mod_base = OTHER; note = 2'O-methyl cytidine phosphorothioate
  modified_base 21: mod_base = OTHER; note = 2'O-methyl adenosine
ctaggacatttttggatcaca

SEQ ID NO: 430 - RNA, 21 nt, synthetic construct
  source 1..21: mol_type = other RNA
  modified_base 1: mod_base = OTHER; note = 2'O-methyl uridine phosphorothioate
  modified_base 2: mod_base = OTHER; note = 2'O-methyl uridine phosphorothioate
  modified_base 3: mod_base = OTHER; note = 2'O-methyl uridine
  modified_base 4: mod_base = OTHER; note = 2'O-methyl uridine
  modified_base 5: mod_base = OTHER; note = 2'O-methyl uridine
  modified_base 6: mod_base = OTHER; note = 2'O-methyl guanosine
  modified_base 7: mod_base = OTHER; note = 2'-fluoro guanosine
  modified_base 8: mod_base = OTHER; note = 2'O-methyl adenosine
  modified_base 9: mod_base = OTHER; note = 2'-fluoro uridine
  modified_base 10: mod_base = OTHER; note = 2'-fluoro cytidine
  modified_base 11: mod_base = OTHER; note = 2'-fluoro adenosine
  modified_base 12: mod_base = OTHER; note = 2'O-methyl cytidine
  modified_base 13: mod_base = OTHER; note = 2'O-methyl adenosine
  modified_base 14: mod_base = OTHER; note = 2'O-methyl adenosine
  modified_base 15: mod_base = OTHER; note = 2'O-methyl adenosine
  modified_base 16: mod_base = OTHER; note = 2'O-methyl adenosine
  modified_base 17: mod_base = OTHER; note = 2'O-methyl guanosine
  modified_base 18: mod_base = OTHER; note = 2'O-methyl cytidine
  modified_base 19: mod_base = OTHER; note = 2'O-methyl adenosine
  modified_base 20: mod_base = OTHER; note = 2'O-methyl cytidine phosphorothioate
  modified_base 21: mod_base = OTHER; note = 2'O-methyl uridine
tttttggatcacaaaagcact

SEQ ID NO: 431 - RNA, 21 nt, synthetic construct
  source 1..21: mol_type = other RNA
  modified_base 1: mod_base = OTHER; note = 2'O-methyl uridine phosphorothioate
  modified_base 2: mod_base = OTHER; note = 2'O-methyl guanosine phosphorothioate
  modified_base 3: mod_base = OTHER; note = 2'O-methyl guanosine
  modified_base 4: mod_base = OTHER; note = 2'O-methyl adenosine
  modified_base 5: mod_base = OTHER; note = 2'O-methyl uridine
  modified_base 6: mod_base = OTHER; note = 2'O-methyl cytidine
  modified_base 7: mod_base = OTHER; note = 2'-fluoro adenosine
  modified_base 8: mod_base = OTHER; note = 2'O-methyl cytidine
  modified_base 9: mod_base = OTHER; note = 2'-fluoro adenosine
  modified_base 10: mod_base = OTHER; note = 2'-fluoro adenosine
  modified_base 11: mod_base = OTHER; note = 2'-fluoro adenosine
  modified_base 12: mod_base = OTHER; note = 2'O-methyl adenosine
  modified_base 13: mod_base = OTHER; note = 2'O-methyl guanosine
  modified_base 14: mod_base = OTHER; note = 2'O-methyl cytidine
  modified_base 15: mod_base = OTHER; note = 2'O-methyl adenosine
  modified_base 16: mod_base = OTHER; note = 2'O-methyl cytidine
  modified_base 17: mod_base = OTHER; note = 2'O-methyl uridine
  modified_base 18: mod_base = OTHER; note = 2'O-methyl uridine
  modified_base 19: mod_base = OTHER; note = 2'O-methyl cytidine
  modified_base 20: mod_base = OTHER; note = 2'O-methyl uridine phosphorothioate
  modified_base 21: mod_base = OTHER; note = 2'O-methyl uridine
tggatcacaaaagcacttctt

SEQ ID NO: 432 - RNA, 21 nt, synthetic construct
  source 1..21: mol_type = other RNA
  modified_base 1: mod_base = OTHER; note = 2'O-methyl uridine phosphorothioate
  modified_base 2: mod_base = OTHER; note = 2'O-methyl uridine phosphorothioate
  modified_base 3: mod_base = OTHER; note = 2'O-methyl guanosine
  modified_base 4: mod_base = OTHER; note = 2'O-methyl guanosine
  modified_base 5: mod_base = OTHER; note = 2'O-methyl guanosine
  modified_base 6: mod_base = OTHER; note = 2'O-methyl adenosine
  modified_base 7: mod_base = OTHER; note = 2'-fluoro adenosine
  modified_base 8: mod_base = OTHER; note = 2'O-methyl adenosine
  modified_base 9: mod_base = OTHER; note = 2'-fluoro adenosine
  modified_base 10: mod_base = OTHER; note = 2'-fluoro adenosine
  modified_base 11: mod_base = OTHER; note = 2'-fluoro cytidine
  modified_base 12: mod_base = OTHER; note = 2'O-methyl uridine
  modified_base 13: mod_base = OTHER; note = 2'O-methyl guanosine
  modified_base 14: mod_base = OTHER; note = 2'O-methyl guanosine
  modified_base 15: mod_base = OTHER; note = 2'O-methyl uridine
  modified_base 16: mod_base = OTHER; note = 2'O-methyl adenosine
  modified_base 17: mod_base = OTHER; note = 2'O-methyl uridine
  modified_base 18: mod_base = OTHER; note = 2'O-methyl cytidine
  modified_base 19: mod_base = OTHER; note = 2'O-methyl adenosine
  modified_base 20: mod_base = OTHER; note = 2'O-methyl adenosine phosphorothioate
  modified_base 21: mod_base = OTHER; note = 2'O-methyl adenosine
ttgggaaaaactggtatcaaa

SEQ ID NO: 433 - RNA, 21 nt, synthetic construct
  source 1..21: mol_type = other RNA
  modified_base 1: mod_base = OTHER; note = 2'O-methyl adenosine phosphorothioate
  modified_base 2: mod_base = OTHER; note = 2'O-methyl adenosine phosphorothioate
  modified_base 3: mod_base = OTHER; note = 2'O-methyl adenosine
  modified_base 4: mod_base = OTHER; note = 2'O-methyl adenosine
  modified_base 5: mod_base = OTHER; note = 2'O-methyl cytidine
  modified_base 6: mod_base = OTHER; note = 2'O-methyl uridine
  modified_base 7: mod_base = OTHER; note = 2'-fluoro guanosine
  modified_base 8: mod_base = OTHER; note = 2'O-methyl guanosine
  modified_base 9: mod_base = OTHER; note = 2'-fluoro uridine
  modified_base 10: mod_base = OTHER; note = 2'-fluoro adenosine
  modified_base 11: mod_base = OTHER; note = 2'-fluoro uridine
  modified_base 12: mod_base = OTHER; note = 2'O-methyl cytidine
  modified_base 13: mod_base = OTHER; note = 2'O-methyl adenosine
  modified_base 14: mod_base = OTHER; note = 2'O-methyl adenosine
  modified_base 15: mod_base = OTHER; note = 2'O-methyl adenosine
  modified_base 16: mod_base = OTHER; note = 2'O-methyl adenosine
  modified_base 17: mod_base = OTHER; note = 2'O-methyl cytidine
  modified_base 18: mod_base = OTHER; note = 2'O-methyl cytidine
  modified_base 19: mod_base = OTHER; note = 2'O-methyl uridine
  modified_base 20: mod_base = OTHER; note = 2'O-methyl cytidine phosphorothioate
  modified_base 21: mod_base = OTHER; note = 2'O-methyl adenosine
aaaactggtatcaaaacctca

SEQ ID NO: 434 - RNA, 21 nt, synthetic construct
  source 1..21: mol_type = other RNA
  modified_base 1: mod_base = OTHER; note = 2'O-methyl uridine phosphorothioate
  modified_base 2: mod_base = OTHER; note = 2'O-methyl guanosine phosphorothioate
  modified_base 3: mod_base = OTHER; note = 2'O-methyl adenosine
  modified_base 4: mod_base = OTHER; note = 2'O-methyl adenosine
  modified_base 5: mod_base = OTHER; note = 2'O-methyl guanosine
  modified_base 6: mod_base = OTHER; note = 2'O-methyl uridine
  modified_base 7: mod_base = OTHER; note = 2'-fluoro cytidine
  modified_base 8: mod_base = OTHER; note = 2'O-methyl guanosine
  modified_base 9: mod_base = OTHER; note = 2'-fluoro uridine
  modified_base 10: mod_base = OTHER; note = 2'-fluoro adenosine
  modified_base 11: mod_base = OTHER; note = 2'-fluoro adenosine
  modified_base 12: mod_base = OTHER; note = 2'O-methyl guanosine
  modified_base 13: mod_base = OTHER; note = 2'O-methyl adenosine
  modified_base 14: mod_base = OTHER; note = 2'O-methyl adenosine
  modified_base 15: mod_base = OTHER; note = 2'O-methyl guanosine
  modified_base 16: mod_base = OTHER; note = 2'O-methyl uridine
  modified_base 17: mod_base = OTHER; note = 2'O-methyl cytidine
  modified_base 18: mod_base = OTHER; note = 2'O-methyl uridine
  modified_base 19: mod_base = OTHER; note = 2'O-methyl guanosine
  modified_base 20: mod_base = OTHER; note = 2'O-methyl adenosine phosphorothioate
  modified_base 21: mod_base = OTHER; note = 2'O-methyl uridine
tgaagtcgtaagaagtctgat

SEQ ID NO: 435 - RNA, 21 nt, synthetic construct
  source 1..21: mol_type = other RNA
  modified_base 1: mod_base = OTHER; note = 2'O-methyl adenosine phosphorothioate
  modified_base 2: mod_base = OTHER; note = 2'O-methyl guanosine phosphorothioate
  modified_base 3: mod_base = OTHER; note = 2'O-methyl uridine
  modified_base 4: mod_base = OTHER; note = 2'O-methyl cytidine
  modified_base 5: mod_base = OTHER; note = 2'O-methyl uridine
  modified_base 6: mod_base = OTHER; note = 2'O-methyl guanosine
  modified_base 7: mod_base = OTHER; note = 2'-fluoro adenosine
  modified_base 8: mod_base = OTHER; note = 2'O-methyl uridine
  modified_base 9: mod_base = OTHER; note = 2'-fluoro adenosine
  modified_base 10: mod_base = OTHER; note = 2'-fluoro guanosine
  modified_base 11: mod_base = OTHER; note = 2'-fluoro adenosine
  modified_base 12: mod_base = OTHER; note = 2'O-methyl uridine
  modified_base 13: mod_base = OTHER; note = 2'O-methyl guanosine
  modified_base 14: mod_base = OTHER; note = 2'O-methyl guanosine
  modified_base 15: mod_base = OTHER; note = 2'O-methyl adenosine
  modified_base 16: mod_base = OTHER; note = 2'O-methyl adenosine
  modified_base 17: mod_base = OTHER; note = 2'O-methyl uridine
  modified_base 18: mod_base = OTHER; note = 2'O-methyl adenosine
  modified_base 19: mod_base = OTHER; note = 2'O-methyl cytidine
  modified_base 20: mod_base = OTHER; note = 2'O-methyl uridine phosphorothioate
  modified_base 21: mod_base = OTHER; note = 2'O-methyl uridine
agtctgatagatggaatactt

SEQ ID NO: 436 - RNA, 21 nt, synthetic construct
  source 1..21: mol_type = other RNA
  modified_base 1: mod_base = OTHER; note = 2'O-methyl guanosine phosphorothioate
  modified_base 2: mod_base = OTHER; note = 2'O-methyl uridine phosphorothioate
  modified_base 3: mod_base = OTHER; note = 2'O-methyl cytidine
  modified_base 4: mod_base = OTHER; note = 2'O-methyl uridine
  modified_base 5: mod_base = OTHER; note = 2'O-methyl guanosine
  modified_base 6: mod_base = OTHER; note = 2'O-methyl adenosine
  modified_base 7: mod_base = OTHER; note = 2'-fluoro uridine
  modified_base 8: mod_base = OTHER; note = 2'O-methyl adenosine
  modified_base 9: mod_base = OTHER; note = 2'-fluoro guanosine
  modified_base 10: mod_base = OTHER; note = 2'-fluoro adenosine
  modified_base 11: mod_base = OTHER; note = 2'-fluoro uridine
  modified_base 12: mod_base = OTHER; note = 2'O-methyl guanosine
  modified_base 13: mod_base = OTHER; note = 2'O-methyl guanosine
  modified_base 14: mod_base = OTHER; note = 2'O-methyl adenosine
  modified_base 15: mod_base = OTHER; note = 2'O-methyl adenosine
  modified_base 16: mod_base = OTHER; note = 2'O-methyl uridine
  modified_base 17: mod_base = OTHER; note = 2'O-methyl adenosine
  modified_base 18: mod_base = OTHER; note = 2'O-methyl cytidine
  modified_base 19: mod_base = OTHER; note = 2'O-methyl uridine
  modified_base 20: mod_base = OTHER; note = 2'O-methyl uridine phosphorothioate
  modified_base 21: mod_base = OTHER; note = 2'O-methyl adenosine
gtctgatagatggaatactta

SEQ ID NO: 437 - RNA, 21 nt, synthetic construct
  source 1..21: mol_type = other RNA
  modified_base 1: mod_base = OTHER; note = 2'O-methyl adenosine phosphorothioate
  modified_base 2: mod_base = OTHER; note = 2'O-methyl guanosine phosphorothioate
  modified_base 3: mod_base = OTHER; note = 2'O-methyl adenosine
  modified_base 4: mod_base = OTHER; note = 2'O-methyl uridine
  modified_base 5: mod_base = OTHER; note = 2'O-methyl guanosine
  modified_base 6: mod_base = OTHER; note = 2'O-methyl guanosine
  modified_base 7: mod_base = OTHER; note = 2'-fluoro adenosine
  modified_base 8: mod_base = OTHER; note = 2'O-methyl adenosine
  modified_base 9: mod_base = OTHER; note = 2'-fluoro uridine
  modified_base 10: mod_base = OTHER; note = 2'-fluoro adenosine
  modified_base 11: mod_base = OTHER; note = 2'-fluoro cytidine
  modified_base 12: mod_base = OTHER; note = 2'O-methyl uridine
  modified_base 13: mod_base = OTHER; note = 2'O-methyl uridine
  modified_base 14: mod_base = OTHER; note = 2'O-methyl adenosine
  modified_base 15: mod_base = OTHER; note = 2'O-methyl cytidine
  modified_base 16: mod_base = OTHER; note = 2'O-methyl cytidine
  modified_base 17: mod_base = OTHER; note = 2'O-methyl adenosine
  modified_base 18: mod_base = OTHER; note = 2'O-methyl adenosine
  modified_base 19: mod_base = OTHER; note = 2'O-methyl uridine
  modified_base 20: mod_base = OTHER; note = 2'O-methyl adenosine phosphorothioate
  modified_base 21: mod_base = OTHER; note = 2'O-methyl adenosine
agatggaatacttaccaataa

SEQ ID NO: 438 - RNA, 21 nt, synthetic construct
  source 1..21: mol_type = other RNA
  modified_base 1: mod_base = OTHER; note = 2'O-methyl uridine phosphorothioate
  modified_base 2: mod_base = OTHER; note = 2'O-methyl guanosine phosphorothioate
  modified_base 3: mod_base = OTHER; note = 2'O-methyl guanosine
  modified_base 4: mod_base = OTHER; note = 2'O-methyl adenosine
  modified_base 5: mod_base = OTHER; note = 2'O-methyl adenosine
  modified_base 6: mod_base = OTHER; note = 2'O-methyl uridine
  modified_base 7: mod_base = OTHER; note = 2'-fluoro adenosine
  modified_base 8: mod_base = OTHER; note = 2'O-methyl cytidine
  modified_base 9: mod_base = OTHER; note = 2'-fluoro uridine
  modified_base 10: mod_base = OTHER; note = 2'-fluoro uridine
  modified_base 11: mod_base = OTHER; note = 2'-fluoro adenosine
  modified_base 12: mod_base = OTHER; note = 2'O-methyl cytidine
  modified_base 13: mod_base = OTHER; note = 2'O-methyl cytidine
  modified_base 14: mod_base = OTHER; note = 2'O-methyl adenosine
  modified_base 15: mod_base = OTHER; note = 2'O-methyl adenosine
  modified_base 16: mod_base = OTHER; note = 2'O-methyl uridine
  modified_base 17: mod_base = OTHER; note = 2'O-methyl adenosine
  modified_base 18: mod_base = OTHER; note = 2'O-methyl adenosine
  modified_base 19: mod_base = OTHER; note = 2'O-methyl guanosine
  modified_base 20: mod_base = OTHER; note = 2'O-methyl adenosine phosphorothioate
  modified_base 21: mod_base = OTHER; note = 2'O-methyl adenosine
tggaatacttaccaataagaa

SEQ ID NO: 439 - RNA, 21 nt, synthetic construct
  source 1..21: mol_type = other RNA
  modified_base 1: mod_base = OTHER; note = 2'O-methyl adenosine phosphorothioate
  modified_base 2: mod_base = OTHER; note = 2'O-methyl cytidine phosphorothioate
  modified_base 3: mod_base = OTHER; note = 2'O-methyl uridine
  modified_base 4: mod_base = OTHER; note = 2'O-methyl uridine
  modified_base 5: mod_base = OTHER; note = 2'O-methyl adenosine
  modified_base 6: mod_base = OTHER; note = 2'O-methyl cytidine
  modified_base 7: mod_base = OTHER; note = 2'-fluoro cytidine
  modified_base 8: mod_base = OTHER; note = 2'O-methyl adenosine
  modified_base 9: mod_base = OTHER; note = 2'-fluoro adenosine
  modified_base 10: mod_base = OTHER; note = 2'-fluoro uridine
  modified_base 11: mod_base = OTHER; note = 2'-fluoro adenosine
  modified_base 12: mod_base = OTHER; note = 2'O-methyl adenosine
  modified_base 13: mod_base = OTHER; note = 2'O-methyl guanosine
  modified_base 14: mod_base = OTHER; note = 2'O-methyl adenosine
  modified_base 15: mod_base = OTHER; note = 2'O-methyl adenosine
  modified_base 16: mod_base = OTHER; note = 2'O-methyl adenosine
  modified_base 17: mod_base = OTHER; note = 2'O-methyl adenosine
  modified_base 18: mod_base = OTHER; note = 2'O-methyl uridine
  modified_base 19: mod_base = OTHER; note = 2'O-methyl guanosine
  modified_base 20: mod_base = OTHER; note = 2'O-methyl adenosine phosphorothioate
  modified_base 21: mod_base = OTHER; note = 2'O-methyl uridine
acttaccaataagaaaatgat

SEQ ID NO: 440 - RNA, 21 nt, synthetic construct
  source 1..21: mol_type = other RNA
  modified_base 1: mod_base = OTHER; note = 2'O-methyl cytidine phosphorothioate
  modified_base 2: mod_base = OTHER; note = 2'O-methyl uridine phosphorothioate
  modified_base 3: mod_base = OTHER; note = 2'O-methyl uridine
  modified_base 4: mod_base = OTHER; note = 2'O-methyl adenosine
  modified_base 5: mod_base = OTHER; note = 2'O-methyl cytidine
  modified_base 6: mod_base = OTHER; note = 2'O-methyl cytidine
  modified_base 7: mod_base = OTHER; note = 2'-fluoro adenosine
  modified_base 8: mod_base = OTHER; note = 2'O-methyl adenosine
  modified_base 9: mod_base = OTHER; note = 2'-fluoro uridine
  modified_base 10: mod_base = OTHER; note = 2'-fluoro adenosine
  modified_base 11: mod_base = OTHER; note = 2'-fluoro adenosine
  modified_base 12: mod_base = OTHER; note = 2'O-methyl guanosine
  modified_base 13: mod_base = OTHER; note = 2'O-methyl adenosine
  modified_base 14: mod_base = OTHER; note = 2'O-methyl adenosine
  modified_base 15: mod_base = OTHER; note = 2'O-methyl adenosine
  modified_base 16: mod_base = OTHER; note = 2'O-methyl adenosine
  modified_base 17: mod_base = OTHER; note = 2'O-methyl uridine
  modified_base 18: mod_base = OTHER; note = 2'O-methyl guanosine
  modified_base 19: mod_base = OTHER; note = 2'O-methyl adenosine
  modified_base 20: mod_base = OTHER; note = 2'O-methyl uridine phosphorothioate
  modified_base 21: mod_base = OTHER; note = 2'O-methyl uridine
cttaccaataagaaaatgatt

SEQ ID NO: 441 - RNA, 21 nt, synthetic construct
  source 1..21: mol_type = other RNA
  modified_base 1: mod_base = OTHER; note = 2'O-methyl adenosine phosphorothioate
  modified_base 2: mod_base = OTHER; note = 2'O-methyl cytidine phosphorothioate
  modified_base 3: mod_base = OTHER; note = 2'O-methyl cytidine
  modified_base 4: mod_base = OTHER; note = 2'O-methyl adenosine
  modified_base 5: mod_base = OTHER; note = 2'O-methyl adenosine
  modified_base 6: mod_base = OTHER; note = 2'O-methyl uridine
  modified_base 7: mod_base = OTHER; note = 2'-fluoro adenosine
  modified_base 8: mod_base = OTHER; note = 2'O-methyl adenosine
  modified_base 9: mod_base = OTHER; note = 2'-fluoro guanosine
  modified_base 10: mod_base = OTHER; note = 2'-fluoro adenosine
  modified_base 11: mod_base = OTHER; note = 2'-fluoro adenosine
  modified_base 12: mod_base = OTHER; note = 2'O-methyl adenosine
  modified_base 13: mod_base = OTHER; note = 2'O-methyl adenosine
  modified_base 14: mod_base = OTHER; note = 2'O-methyl uridine
  modified_base 15: mod_base = OTHER; note = 2'O-methyl guanosine
  modified_base 16: mod_base = OTHER; note = 2'O-methyl adenosine
  modified_base 17: mod_base = OTHER; note = 2'O-methyl uridine
  modified_base 18: mod_base = OTHER; note = 2'O-methyl uridine
  modified_base 19: mod_base = OTHER; note = 2'O-methyl uridine
  modified_base 20: mod_base = OTHER; note = 2'O-methyl uridine phosphorothioate
  modified_base 21: mod_base = OTHER; note = 2'O-methyl uridine
accaataagaaaatgattttt

SEQ ID NO: 442 - RNA, 21 nt, synthetic construct
  source 1..21: mol_type = other RNA
  modified_base 1: mod_base = OTHER; note = 2'O-methyl adenosine phosphorothioate
  modified_base 2: mod_base = OTHER; note = 2'O-methyl adenosine phosphorothioate
  modified_base 3: mod_base = OTHER; note = 2'O-methyl guanosine
  modified_base 4: mod_base = OTHER; note = 2'O-methyl adenosine
  modified_base 5: mod_base = OTHER; note = 2'O-methyl adenosine
  modified_base 6: mod_base = OTHER; note = 2'O-methyl adenosine
  modified_base 7: mod_base = OTHER; note = 2'-fluoro adenosine
  modified_base 8: mod_base = OTHER; note = 2'O-methyl uridine
  modified_base 9: mod_base = OTHER; note = 2'-fluoro guanosine
  modified_base 10: mod_base = OTHER; note = 2'-fluoro adenosine
  modified_base 11: mod_base = OTHER; note = 2'-fluoro uridine
  modified_base 12: mod_base = OTHER; note = 2'O-methyl uridine
  modified_base 13: mod_base = OTHER; note = 2'O-methyl uridine
  modified_base 14: mod_base = OTHER; note = 2'O-methyl uridine
  modified_base 15: mod_base = OTHER; note = 2'O-methyl uridine
  modified_base 16: mod_base = OTHER; note = 2'O-methyl guanosine
  modified_base 17: mod_base = OTHER; note = 2'O-methyl uridine
  modified_base 18: mod_base = OTHER; note = 2'O-methyl uridine
  modified_base 19: mod_base = OTHER; note = 2'O-methyl cytidine
  modified_base 20: mod_base = OTHER; note = 2'O-methyl cytidine phosphorothioate
  modified_base 21: mod_base = OTHER; note = 2'O-methyl adenosine
aagaaaatgatttttgttcca

SEQ ID NO: 443 - RNA, 21 nt, synthetic construct
  source 1..21: mol_type = other RNA
  modified_base 1: mod_base = OTHER; note = 2'O-methyl adenosine phosphorothioate
  modified_base 2: mod_base = OTHER; note = 2'O-methyl adenosine phosphorothioate
  modified_base 3: mod_base = OTHER; note = 2'O-methyl uridine
  modified_base 4: mod_base = OTHER; note = 2'O-methyl guanosine
  modified_base 5: mod_base = OTHER; note = 2'O-methyl adenosine
  modified_base 6: mod_base = OTHER; note = 2'O-methyl uridine
  modified_base 7: mod_base = OTHER; note = 2'-fluoro uridine
  modified_base 8: mod_base = OTHER; note = 2'O-methyl uridine
  modified_base 9: mod_base = OTHER; note = 2'-fluoro uridine
  modified_base 10: mod_base = OTHER; note = 2'-fluoro uridine
  modified_base 11: mod_base = OTHER; note = 2'-fluoro guanosine
  modified_base 12: mod_base = OTHER; note = 2'O-methyl uridine
  modified_base 13: mod_base = OTHER; note = 2'O-methyl uridine
  modified_base 14: mod_base = OTHER; note = 2'O-methyl cytidine
  modified_base 15: mod_base = OTHER; note = 2'O-methyl cytidine
  modified_base 16: mod_base = OTHER; note = 2'O-methyl adenosine
  modified_base 17: mod_base = OTHER; note = 2'O-methyl uridine
  modified_base 18: mod_base = OTHER; note = 2'O-methyl cytidine
  modified_base 19: mod_base = OTHER; note = 2'O-methyl guanosine
  modified_base 20: mod_base = OTHER; note = 2'O-methyl uridine phosphorothioate
  modified_base 21: mod_base = OTHER; note = 2'O-methyl adenosine
aatgatttttgttccatcgta

SEQ ID NO: 444 - RNA, 21 nt, synthetic construct
  source 1..21: mol_type = other RNA
  modified_base 1: mod_base = OTHER; note = 2'O-methyl adenosine phosphorothioate
  modified_base 2: mod_base = OTHER; note = 2'O-methyl uridine phosphorothioate
  modified_base 3: mod_base = OTHER; note = 2'O-methyl guanosine
  modified_base 4: mod_base = OTHER; note = 2'O-methyl adenosine
  modified_base 5: mod_base = OTHER; note = 2'O-methyl uridine
  modified_base 6: mod_base = OTHER; note = 2'O-methyl uridine
  modified_base 7: mod_base = OTHER; note = 2'-fluoro uridine
  modified_base 8: mod_base = OTHER; note = 2'O-methyl uridine
  modified_base 9: mod_base = OTHER; note = 2'-fluoro uridine
  modified_base 10: mod_base = OTHER; note = 2'-fluoro guanosine
  modified_base 11: mod_base = OTHER; note = 2'-fluoro uridine
  modified_base 12: mod_base = OTHER; note = 2'O-methyl uridine
  modified_base 13: mod_base = OTHER; note = 2'O-methyl cytidine
  modified_base 14: mod_base = OTHER; note = 2'O-methyl cytidine
  modified_base 15: mod_base = OTHER; note = 2'O-methyl adenosine
  modified_base 16: mod_base = OTHER; note = 2'O-methyl uridine
  modified_base 17: mod_base = OTHER; note = 2'O-methyl cytidine
  modified_base 18: mod_base = OTHER; note = 2'O-methyl guanosine
  modified_base 19: mod_base = OTHER; note = 2'O-methyl uridine
  modified_base 20: mod_base = OTHER; note = 2'O-methyl adenosine phosphorothioate
  modified_base 21: mod_base = OTHER; note = 2'O-methyl uridine
atgatttttgttccatcgtat

SEQ ID NO: 445 - RNA, 21 nt, synthetic construct
  source 1..21: mol_type = other RNA
  modified_base 1: mod_base = OTHER; note = 2'O-methyl uridine phosphorothioate
  modified_base 2: mod_base = OTHER; note = 2'O-methyl uridine phosphorothioate
  modified_base 3: mod_base = OTHER; note = 2'O-methyl uridine
  modified_base 4: mod_base = OTHER; note = 2'O-methyl uridine
  modified_base 5: mod_base = OTHER; note = 2'O-methyl guanosine
  modified_base 6: mod_base = OTHER; note = 2'O-methyl uridine
  modified_base 7: mod_base = OTHER; note = 2'-fluoro uridine
  modified_base 8: mod_base = OTHER; note = 2'O-methyl cytidine
  modified_base 9: mod_base = OTHER; note = 2'-fluoro cytidine
  modified_base 10: mod_base = OTHER; note = 2'-fluoro adenosine
  modified_base 11: mod_base = OTHER; note = 2'-fluoro uridine
  modified_base 12: mod_base = OTHER; note = 2'O-methyl cytidine
  modified_base 13: mod_base = OTHER; note = 2'O-methyl guanosine
  modified_base 14: mod_base = OTHER; note = 2'O-methyl uridine
  modified_base 15: mod_base = OTHER; note = 2'O-methyl adenosine
  modified_base 16: mod_base = OTHER; note = 2'O-methyl uridine
  modified_base 17: mod_base = OTHER; note = 2'O-methyl adenosine
  modified_base 18: mod_base = OTHER; note = 2'O-methyl uridine
  modified_base 19: mod_base = OTHER; note = 2'O-methyl cytidine
  modified_base 20: mod_base = OTHER; note = 2'O-methyl adenosine phosphorothioate
  modified_base 21: mod_base = OTHER; note = 2'O-methyl adenosine
ttttgttccatcgtatatcaa

SEQ ID NO: 446 - RNA, 23 nt, synthetic construct
  source 1..23: mol_type = other RNA
  modified_base 1: mod_base = OTHER; note = 5' vinyl phosphonate 2'O-methyl uridine phosphorothioate
  modified_base 2: mod_base = OTHER; note = 2'-fluoro cytidine phosphorothioate
  modified_base 3: mod_base = OTHER; note = 2'O-methyl cytidine
  modified_base 4: mod_base = OTHER; note = 2'O-methyl adenosine
  modified_base 5: mod_base = OTHER; note = 2'O-methyl adenosine
  modified_base 6: mod_base = OTHER; note = 2'-fluoro guanosine
  modified_base 7: mod_base = OTHER; note = 2'O-methyl uridine
  modified_base 8: mod_base = OTHER; note = 2'O-methyl adenosine
  modified_base 9: mod_base = OTHER; note = 2'O-methyl guanosine
  modified_base 10: mod_base = OTHER; note = 2'O-methyl guanosine
  modified_base 11: mod_base = OTHER; note = 2'O-methyl adenosine
  modified_base 12: mod_base = OTHER; note = 2'O-methyl guanosine
  modified_base 13: mod_base = OTHER; note = 2'O-methyl uridine
  modified_base 14: mod_base = OTHER; note = 2'-fluoro adenosine
  modified_base 15: mod_base = OTHER; note = 2'O-methyl guanosine
  modified_base 16: mod_base = OTHER; note = 2'-fluoro adenosine
  modified_base 17: mod_base = OTHER; note = 2'O-methyl uridine
  modified_base 18: mod_base = OTHER; note = 2'O-methyl guanosine
  modified_base 19: mod_base = OTHER; note = 2'O-methyl adenosine
  modified_base 20: mod_base = OTHER; note = 2'O-methyl uridine
  modified_base 21: mod_base = OTHER; note = 2'O-methyl guanosine phosphorothioate
  modified_base 22: mod_base = OTHER; note = 2'O-methyl uridine phosphorothioate
  modified_base 23: mod_base = OTHER; note = 2'O-methyl uridine
tccaagtaggagtagatgatgtt

SEQ ID NO: 447 - RNA, 23 nt, synthetic construct
  source 1..23: mol_type = other RNA
  modified_base 1: mod_base = OTHER; note = 5' vinyl phosphonate 2'O-methyl adenosine phosphorothioate
  modified_base 2: mod_base = OTHER; note = 2'-fluoro adenosine phosphorothioate
  modified_base 3: mod_base = OTHER; note = 2'O-methyl cytidine
  modified_base 4: mod_base = OTHER; note = 2'O-methyl guanosine
  modified_base 5: mod_base = OTHER; note = 2'O-methyl adenosine
  modified_base 6: mod_base = OTHER; note = 2'-fluoro cytidine
  modified_base 7: mod_base = OTHER; note = 2'O-methyl uridine
  modified_base 8: mod_base = OTHER; note = 2'O-methyl cytidine
  modified_base 9: mod_base = OTHER; note = 2'O-methyl cytidine
  modified_base 10: mod_base = OTHER; note = 2'O-methyl adenosine
  modified_base 11: mod_base = OTHER; note = 2'O-methyl adenosine
  modified_base 12: mod_base = OTHER; note = 2'O-methyl guanosine
  modified_base 13: mod_base = OTHER; note = 2'O-methyl uridine
  modified_base 14: mod_base = OTHER; note = 2'-fluoro adenosine
  modified_base 15: mod_base = OTHER; note = 2'O-methyl guanosine
  modified_base 16: mod_base = OTHER; note = 2'-fluoro guanosine
  modified_base 17: mod_base = OTHER; note = 2'O-methyl adenosine
  modified_base 18: mod_base = OTHER; note = 2'O-methyl guanosine
  modified_base 19: mod_base = OTHER; note = 2'O-methyl uridine
  modified_base 20: mod_base = OTHER; note = 2'O-methyl adenosine
  modified_base 21: mod_base = OTHER; note = 2'O-methyl guanosine phosphorothioate
  modified_base 22: mod_base = OTHER; note = 2'O-methyl uridine phosphorothioate
  modified_base 23: mod_base = OTHER; note = 2'O-methyl uridine
aacgactccaagtaggagtagtt

SEQ ID NO: 448 - RNA, 23 nt, synthetic construct
  source 1..23: mol_type = other RNA
  modified_base 1: mod_base = OTHER; note = 5' vinyl phosphonate 2'O-methyl uridine phosphorothioate
  modified_base 2: mod_base = OTHER; note = 2'-fluoro cytidine phosphorothioate
  modified_base 3: mod_base = OTHER; note = 2'O-methyl adenosine
  modified_base 4: mod_base = OTHER; note = 2'O-methyl cytidine
  modified_base 5: mod_base = OTHER; note = 2'O-methyl cytidine
  modified_base 6: mod_base = OTHER; note = 2'-fluoro adenosine
  modified_base 7: mod_base = OTHER; note = 2'O-methyl adenosine
  modified_base 8: mod_base = OTHER; note = 2'O-methyl cytidine
  modified_base 9: mod_base = OTHER; note = 2'O-methyl guanosine
  modified_base 10: mod_base = OTHER; note = 2'O-methyl adenosine
  modified_base 11: mod_base = OTHER; note = 2'O-methyl cytidine
  modified_base 12: mod_base = OTHER; note = 2'O-methyl uridine
  modified_base 13: mod_base = OTHER; note = 2'O-methyl cytidine
  modified_base 14: mod_base = OTHER; note = 2'-fluoro cytidine
  modified_base 15: mod_base = OTHER; note = 2'O-methyl adenosine
  modified_base 16: mod_base = OTHER; note = 2'-fluoro adenosine
  modified_base 17: mod_base = OTHER; note = 2'O-methyl guanosine
  modified_base 18: mod_base = OTHER; note = 2'O-methyl uridine
  modified_base 19: mod_base = OTHER; note = 2'O-methyl adenosine
  modified_base 20: mod_base = OTHER; note = 2'O-methyl guanosine
  modified_base 21: mod_base = OTHER; note = 2'O-methyl guanosine phosphorothioate
  modified_base 22: mod_base = OTHER; note = 2'O-methyl uridine phosphorothioate
  modified_base 23: mod_base = OTHER; note = 2'O-methyl uridine
tcaccaacgactccaagtaggtt

SEQ ID NO: 449 - RNA, 23 nt, synthetic construct
  source 1..23: mol_type = other RNA
  modified_base 1: mod_base = OTHER; note = 5' vinyl phosphonate 2'O-methyl uridine phosphorothioate
  modified_base 2: mod_base = OTHER; note = 2'-fluoro uridine phosphorothioate
  modified_base 3: mod_base = OTHER; note = 2'O-methyl cytidine
  modified_base 4: mod_base = OTHER; note = 2'O-methyl adenosine
  modified_base 5: mod_base = OTHER; note = 2'O-methyl cytidine
  modified_base 6: mod_base = OTHER; note = 2'-fluoro cytidine
  modified_base 7: mod_base = OTHER; note = 2'O-methyl adenosine
  modified_base 8: mod_base = OTHER; note = 2'O-methyl adenosine
  modified_base 9: mod_base = OTHER; note = 2'O-methyl cytidine
  modified_base 10: mod_base = OTHER; note = 2'O-methyl guanosine
  modified_base 11: mod_base = OTHER; note = 2'O-methyl adenosine
  modified_base 12: mod_base = OTHER; note = 2'O-methyl cytidine
  modified_base 13: mod_base = OTHER; note = 2'O-methyl uridine
  modified_base 14: mod_base = OTHER; note = 2'-fluoro cytidine
  modified_base 15: mod_base = OTHER; note = 2'O-methyl cytidine
  modified_base 16: mod_base = OTHER; note = 2'-fluoro adenosine
  modified_base 17: mod_base = OTHER; note = 2'O-methyl adenosine
  modified_base 18: mod_base = OTHER; note = 2'O-methyl guanosine
  modified_base 19: mod_base = OTHER; note = 2'O-methyl uridine
  modified_base 20: mod_base = OTHER; note = 2'O-methyl adenosine
  modified_base 21: mod_base = OTHER; note = 2'O-methyl guanosine phosphorothioate
  modified_base 22: mod_base = OTHER; note = 2'O-methyl uridine phosphorothioate
  modified_base 23: mod_base = OTHER; note = 2'O-methyl uridine
ttcaccaacgactccaagtagtt

SEQ ID NO: 450 - RNA, 23 nt, synthetic construct
  source 1..23: mol_type = other RNA
  modified_base 1: mod_base = OTHER; note = 5' vinyl phosphonate 2'O-methyl adenosine phosphorothioate
  modified_base 2: mod_base = OTHER; note = 2'-fluoro adenosine phosphorothioate
  modified_base 3: mod_base = OTHER; note = 2'O-methyl cytidine
  modified_base 4: mod_base = OTHER; note = 2'O-methyl uridine
  modified_base 5: mod_base = OTHER; note = 2'O-methyl uridine
  modified_base 6: mod_base = OTHER; note = 2'-fluoro cytidine
  modified_base 7: mod_base = OTHER; note = 2'O-methyl adenosine
  modified_base 8: mod_base = OTHER; note = 2'O-methyl cytidine
  modified_base 9: mod_base = OTHER; note = 2'O-methyl cytidine
  modified_base 10: mod_base = OTHER; note = 2'O-methyl adenosine
  modified_base 11: mod_base = OTHER; note = 2'O-methyl adenosine
  modified_base 12: mod_base = OTHER; note = 2'O-methyl cytidine
  modified_base 13: mod_base = OTHER; note = 2'O-methyl guanosine
  modified_base 14: mod_base = OTHER; note = 2'-fluoro adenosine
  modified_base 15: mod_base = OTHER; note = 2'O-methyl cytidine
  modified_base 16: mod_base = OTHER; note = 2'-fluoro uridine
  modified_base 17: mod_base = OTHER; note = 2'O-methyl cytidine
  modified_base 18: mod_base = OTHER; note = 2'O-methyl cytidine
  modified_base 19: mod_base = OTHER; note = 2'O-methyl adenosine
  modified_base 20: mod_base = OTHER; note = 2'O-methyl adenosine
  modified_base 21: mod_base = OTHER; note = 2'O-methyl guanosine phosphorothioate
  modified_base 22: mod_base = OTHER; note = 2'O-methyl uridine phosphorothioate
  modified_base 23: mod_base = OTHER; note = 2'O-methyl uridine
aacttcaccaacgactccaagtt

SEQ ID NO: 451 - RNA, 23 nt, synthetic construct
  source 1..23: mol_type = other RNA
  modified_base 1: mod_base = OTHER; note = 5' vinyl phosphonate 2'O-methyl adenosine phosphorothioate
  modified_base 2: mod_base = OTHER; note = 2'-fluoro adenosine phosphorothioate
  modified_base 3: mod_base = OTHER; note = 2'O-methyl adenosine
  modified_base 4: mod_base = OTHER; note = 2'O-methyl adenosine
  modified_base 5: mod_base = OTHER; note = 2'O-methyl cytidine
  modified_base 6: mod_base = OTHER; note = 2'-fluoro uridine
  modified_base 7: mod_base = OTHER; note = 2'O-methyl uridine
  modified_base 8: mod_base = OTHER; note = 2'O-methyl cytidine
  modified_base 9: mod_base = OTHER; note = 2'O-methyl adenosine
  modified_base 10: mod_base = OTHER; note = 2'O-methyl cytidine
  modified_base 11: mod_base = OTHER; note = 2'O-methyl cytidine
  modified_base 12: mod_base = OTHER; note = 2'O-methyl adenosine
  modified_base 13: mod_base = OTHER; note = 2'O-methyl adenosine
  modified_base 14: mod_base = OTHER; note = 2'-fluoro cytidine
  modified_base 15: mod_base = OTHER; note = 2'O-methyl guanosine
  modified_base 16: mod_base = OTHER; note = 2'-fluoro adenosine
  modified_base 17: mod_base = OTHER; note = 2'O-methyl cytidine
  modified_base 18: mod_base = OTHER; note = 2'O-methyl uridine
  modified_base 19: mod_base = OTHER; note = 2'O-methyl cytidine
  modified_base 20: mod_base = OTHER; note = 2'O-methyl cytidine
  modified_base 21: mod_base = OTHER; note = 2'O-methyl adenosine phosphorothioate
  modified_base 22: mod_base = OTHER; note = 2'O-methyl uridine phosphorothioate
  modified_base 23: mod_base = OTHER; note = 2'O-methyl uridine
aaaacttcaccaacgactccatt

SEQ ID NO: 452 - RNA, 23 nt, synthetic construct
  source 1..23: mol_type = other RNA
  modified_base 1: mod_base = OTHER; note = 5' vinyl phosphonate 2'O-methyl adenosine phosphorothioate
  modified_base 2: mod_base = OTHER; note = 2'-fluoro guanosine phosphorothioate
  modified_base 3: mod_base = OTHER; note = 2'O-methyl guanosine
  modified_base 4: mod_base = OTHER; note = 2'O-methyl adenosine
  modified_base 5: mod_base = OTHER; note = 2'O-methyl adenosine
  modified_base 6: mod_base = OTHER; note = 2'-fluoro uridine
  modified_base 7: mod_base = OTHER; note = 2'O-methyl guanosine
  modified_base 8: mod_base = OTHER; note = 2'O-methyl adenosine
  modified_base 9: mod_base = OTHER; note = 2'O-methyl adenosine
  modified_base 10: mod_base = OTHER; note = 2'O-methyl adenosine
  modified_base 11: mod_base = OTHER; note = 2'O-methyl adenosine
  modified_base 12: mod_base = OTHER; note = 2'O-methyl adenosine
  modified_base 13: mod_base = OTHER; note = 2'O-methyl cytidine
  modified_base 14: mod_base = OTHER; note = 2'-fluoro uridine
  modified_base 15: mod_base = OTHER; note = 2'O-methyl uridine
  modified_base 16: mod_base = OTHER; note = 2'-fluoro cytidine
  modified_base 17: mod_base = OTHER; note = 2'O-methyl adenosine
  modified_base 18: mod_base = OTHER; note = 2'O-methyl cytidine
  modified_base 19: mod_base = OTHER; note = 2'O-methyl cytidine
  modified_base 20: mod_base = OTHER; note = 2'O-methyl adenosine
  modified_base 21: mod_base = OTHER; note = 2'O-methyl adenosine phosphorothioate
  modified_base 22: mod_base = OTHER; note = 2'O-methyl uridine phosphorothioate
  modified_base 23: mod_base = OTHER; note = 2'O-methyl uridine
aggaatgaaaaacttcaccaatt

SEQ ID NO: 453 - RNA, 23 nt, synthetic construct
  source 1..23: mol_type = other RNA
  modified_base 1: mod_base = OTHER; note = 5' vinyl phosphonate 2'O-methyl uridine phosphorothioate
  modified_base 2: mod_base = OTHER; note = 2'-fluoro guanosine phosphorothioate
  modified_base 3: mod_base = OTHER; note = 2'O-methyl adenosine
  modified_base 4: mod_base = OTHER; note = 2'O-methyl guanosine
  modified_base 5: mod_base = OTHER; note = 2'O-methyl guanosine
  modified_base 6: mod_base = OTHER; note = 2'-fluoro adenosine
  modified_base 7: mod_base = OTHER; note = 2'O-methyl adenosine
  modified_base 8: mod_base = OTHER; note = 2'O-methyl uridine
  modified_base 9: mod_base = OTHER; note = 2'O-methyl guanosine
  modified_base 10: mod_base = OTHER; note = 2'O-methyl adenosine
  modified_base 11: mod_base = OTHER; note = 2'O-methyl adenosine
  modified_base 12: mod_base = OTHER; note = 2'O-methyl adenosine
  modified_base 13: mod_base = OTHER; note = 2'O-methyl adenosine
  modified_base 14: mod_base = OTHER; note = 2'-fluoro adenosine
  modified_base 15: mod_base = OTHER; note = 2'O-methyl cytidine
  modified_base 16: mod_base = OTHER; note = 2'-fluoro uridine
  modified_base 17: mod_base = OTHER; note = 2'O-methyl uridine
  modified_base 18: mod_base = OTHER; note = 2'O-methyl cytidine
  modified_base 19: mod_base = OTHER; note = 2'O-methyl adenosine
  modified_base 20: mod_base = OTHER; note = 2'O-methyl cytidine
  modified_base 21: mod_base = OTHER; note = 2'O-methyl cytidine phosphorothioate
  modified_base 22: mod_base = OTHER; note = 2'O-methyl uridine phosphorothioate
  modified_base 23: mod_base = OTHER; note = 2'O-methyl uridine
tgaggaatgaaaaacttcacctt

SEQ ID NO: 454 - RNA, 23 nt, synthetic construct
  source 1..23: mol_type = other RNA
  modified_base 1: mod_base = OTHER; note = 5' vinyl phosphonate 2'O-methyl adenosine phosphorothioate
  modified_base 2: mod_base = OTHER; note = 2'-fluoro guanosine phosphorothioate
  modified_base 3: mod_base = OTHER; note = 2'O-methyl uridine
  modified_base 4: mod_base = OTHER; note = 2'O-methyl adenosine
  modified_base 5: mod_base = OTHER; note = 2'O-methyl guanosine
  modified_base 6: mod_base = OTHER; note = 2'-fluoro uridine
  modified_base 7: mod_base = OTHER; note = 2'O-methyl cytidine
  modified_base 8: mod_base = OTHER; note = 2'O-methyl uridine
  modified_base 9: mod_base = OTHER; note = 2'O-methyl guanosine
  modified_base 10: mod_base = OTHER; note = 2'O-methyl cytidine
  modified_base 11: mod_base = OTHER; note = 2'O-methyl cytidine
  modified_base 12: mod_base = OTHER; note = 2'O-methyl uridine
  modified_base 13: mod_base = OTHER; note = 2'O-methyl guanosine
  modified_base 14: mod_base = OTHER; note = 2'-fluoro cytidine
  modified_base 15: mod_base = OTHER; note = 2'O-methyl cytidine
  modified_base 16: mod_base = OTHER; note = 2'-fluoro uridine
  modified_base 17: mod_base = OTHER; note = 2'O-methyl adenosine
  modified_base 18: mod_base = OTHER; note = 2'O-methyl uridine
  modified_base 19: mod_base = OTHER; note = 2'O-methyl uridine
  modified_base 20: mod_base = OTHER; note = 2'O-methyl cytidine
  modified_base 21: mod_base = OTHER; note = 2'O-methyl cytidine phosphorothioate
  modified_base 22: mod_base = OTHER; note = 2'O-methyl uridine phosphorothioate
  modified_base 23: mod_base = OTHER; note = 2'O-methyl uridine
agtagtctgcctgcctattcctt

SEQ ID NO: 455 - RNA, 23 nt, synthetic construct
  source 1..23: mol_type = other RNA
  modified_base 1: mod_base = OTHER; note = 5' vinyl phosphonate 2'O-methyl adenosine phosphorothioate
  modified_base 2: mod_base = OTHER; note = 2'-fluoro adenosine phosphorothioate
  modified_base 3: mod_base = OTHER; note = 2'O-methyl guanosine
  modified_base 4: mod_base = OTHER; note = 2'O-methyl uridine
  modified_base 5: mod_base = OTHER; note = 2'O-methyl adenosine
  modified_base 6: mod_base = OTHER; note = 2'-fluoro guanosine
  modified_base 7: mod_base = OTHER; note = 2'O-methyl uridine
  modified_base 8: mod_base = OTHER; note = 2'O-methyl cytidine
  modified_base 9: mod_base = OTHER; note = 2'O-methyl uridine
  modified_base 10: mod_base = OTHER; note = 2'O-methyl guanosine
  modified_base 11: mod_base = OTHER; note = 2'O-methyl cytidine
  modified_base 12: mod_base = OTHER; note = 2'O-methyl cytidine
  modified_base 13: mod_base = OTHER; note = 2'O-methyl uridine
  modified_base 14: mod_base = OTHER; note = 2'-fluoro guanosine
  modified_base 15: mod_base = OTHER; note = 2'O-methyl cytidine
  modified_base 16: mod_base = OTHER; note = 2'-fluoro cytidine
  modified_base 17: mod_base = OTHER; note = 2'O-methyl uridine
  modified_base 18: mod_base = OTHER; note = 2'O-methyl adenosine
  modified_base 19: mod_base = OTHER; note = 2'O-methyl uridine
  modified_base 20: mod_base = OTHER; note = 2'O-methyl uridine
  modified_base 21: mod_base = OTHER; note = 2'O-methyl cytidine phosphorothioate
  modified_base 22: mod_base = OTHER; note = 2'O-methyl uridine phosphorothioate
  modified_base 23: mod_base = OTHER; note = 2'O-methyl uridine
aagtagtctgcctgcctattctt

SEQ ID NO: 456 - RNA, 23 nt, synthetic construct
  source 1..23: mol_type = other RNA
  modified_base 1: mod_base = OTHER; note = 5' vinyl phosphonate 2'O-methyl uridine phosphorothioate
  modified_base 2: mod_base = OTHER; note = 2'-fluoro adenosine phosphorothioate
  modified_base 3: mod_base = OTHER; note = 2'O-methyl adenosine
  modified_base 4: mod_base = OTHER; note = 2'O-methyl guanosine
  modified_base 5: mod_base = OTHER; note = 2'O-methyl uridine
  modified_base 6: mod_base = OTHER; note = 2'-fluoro adenosine
  modified_base 7: mod_base = OTHER; note = 2'O-methyl guanosine
  modified_base 8: mod_base = OTHER; note = 2'O-methyl uridine
  modified_base 9: mod_base = OTHER; note = 2'O-methyl cytidine
  modified_base 10: mod_base = OTHER; note = 2'O-methyl uridine
  modified_base 11: mod_base = OTHER; note = 2'O-methyl guanosine
  modified_base 12: mod_base = OTHER; note = 2'O-methyl cytidine
  modified_base 13: mod_base = OTHER; note = 2'O-methyl cytidine
  modified_base 14: mod_base = OTHER; note = 2'-fluoro uridine
  modified_base 15: mod_base = OTHER; note = 2'O-methyl guanosine
  modified_base 16: mod_base = OTHER; note = 2'-fluoro cytidine
  modified_base 17: mod_base = OTHER; note = 2'O-methyl cytidine
  modified_base 18: mod_base = OTHER; note = 2'O-methyl uridine
  modified_base 19: mod_base = OTHER; note = 2'O-methyl adenosine
  modified_base 20: mod_base = OTHER; note = 2'O-methyl uridine
  modified_base 21: mod_base = OTHER; note = 2'O-methyl uridine phosphorothioate
  modified_base 22: mod_base = OTHER; note = 2'O-methyl uridine phosphorothioate
  modified_base 23: mod_base = OTHER; note = 2'O-methyl uridine
taagtagtctgcctgcctatttt

SEQ ID NO: 457 - RNA, 23 nt, synthetic construct
  source 1..23: mol_type = other RNA
  modified_base 1: mod_base = OTHER; note = 5' vinyl phosphonate 2'O-methyl adenosine phosphorothioate
  modified_base 2: mod_base = OTHER; note = 2'-fluoro uridine phosphorothioate
  modified_base 3: mod_base = OTHER; note = 2'O-methyl adenosine
  modified_base 4: mod_base = OTHER; note = 2'O-methyl adenosine
  modified_base 5: mod_base = OTHER; note = 2'O-methyl guanosine
  modified_base 6: mod_base = OTHER; note = 2'-fluoro uridine
  modified_base 7: mod_base = OTHER; note = 2'O-methyl adenosine
  modified_base 8: mod_base = OTHER; note = 2'O-methyl guanosine
  modified_base 9: mod_base = OTHER; note = 2'O-methyl uridine
  modified_base 10: mod_base = OTHER; note = 2'O-methyl cytidine
  modified_base 11: mod_base = OTHER; note = 2'O-methyl uridine
  modified_base 12: mod_base = OTHER; note = 2'O-methyl guanosine
  modified_base 13: mod_base = OTHER; note = 2'O-methyl cytidine
  modified_base 14: mod_base = OTHER; note = 2'-fluoro cytidine
  modified_base 15: mod_base = OTHER; note = 2'O-methyl uridine
  modified_base 16: mod_base = OTHER; note = 2'-fluoro guanosine
  modified_base 17: mod_base = OTHER; note = 2'O-methyl cytidine
  modified_base 18: mod_base = OTHER; note = 2'O-methyl cytidine
  modified_base 19: mod_base = OTHER; note = 2'O-methyl uridine
  modified_base 20: mod_base = OTHER; note = 2'O-methyl adenosine
  modified_base 21: mod_base = OTHER; note = 2'O-methyl uridine phosphorothioate
  modified_base 22: mod_base = OTHER; note = 2'O-methyl uridine phosphorothioate
  modified_base 23: mod_base = OTHER; note = 2'O-methyl uridine
ataagtagtctgcctgcctattt

SEQ ID NO: 458 - RNA, 23 nt, synthetic construct
  source 1..23: mol_type = other RNA
  modified_base 1: mod_base = OTHER; note = 5' vinyl phosphonate 2'O-methyl uridine phosphorothioate
  modified_base 2: mod_base = OTHER; note = 2'-fluoro cytidine phosphorothioate
  modified_base 3: mod_base = OTHER; note = 2'O-methyl adenosine
  modified_base 4: mod_base = OTHER; note = 2'O-methyl uridine
  modified_base 5: mod_base = OTHER; note = 2'O-methyl adenosine
  modified_base 6: mod_base = OTHER; note = 2'-fluoro adenosine
  modified_base 7: mod_base = OTHER; note = 2'O-methyl guanosine
  modified_base 8: mod_base = OTHER; note = 2'O-methyl uridine
  modified_base 9: mod_base = OTHER; note = 2'O-methyl adenosine
  modified_base 10: mod_base = OTHER; note = 2'O-methyl guanosine
  modified_base 11: mod_base = OTHER; note = 2'O-methyl uridine
  modified_base 12: mod_base = OTHER; note = 2'O-methyl cytidine
  modified_base 13: mod_base = OTHER; note = 2'O-methyl uridine
  modified_base 14: mod_base = OTHER; note = 2'-fluoro guanosine
  modified_base 15: mod_base = OTHER; note = 2'O-methyl cytidine
  modified_base 16: mod_base = OTHER; note = 2'-fluoro cytidine
  modified_base 17: mod_base = OTHER; note = 2'O-methyl uridine
  modified_base 18: mod_base = OTHER; note = 2'O-methyl guanosine
  modified_base 19: mod_base = OTHER; note = 2'O-methyl cytidine
  modified_base 20: mod_base = OTHER; note = 2'O-methyl cytidine
  modified_base 21: mod_base = OTHER; note = 2'O-methyl uridine phosphorothioate
  modified_base 22: mod_base = OTHER; note = 2'O-methyl uridine phosphorothioate
  modified_base 23: mod_base = OTHER; note = 2'O-methyl uridine
tcataagtagtctgcctgccttt

SEQ ID NO: 459 - RNA, 23 nt, synthetic construct
  source 1..23: mol_type = other RNA
  modified_base 1: mod_base = OTHER; note = 5' vinyl phosphonate 2'O-methyl uridine phosphorothioate
  modified_base 2: mod_base = OTHER; note = 2'-fluoro uridine phosphorothioate
  modified_base 3: mod_base = OTHER; note = 2'O-methyl cytidine
  modified_base 4: mod_base = OTHER; note = 2'O-methyl adenosine
  modified_base 5: mod_base = OTHER; note = 2'O-methyl uridine
  modified_base 6: mod_base = OTHER; note = 2'-fluoro adenosine
  modified_base 7: mod_base = OTHER; note = 2'O-methyl adenosine
  modified_base 8: mod_base = OTHER; note = 2'O-methyl guanosine
  modified_base 9: mod_base = OTHER; note = 2'O-methyl uridine
  modified_base 10: mod_base = OTHER; note = 2'O-methyl adenosine
  modified_base 11: mod_base = OTHER; note = 2'O-methyl guanosine
  modified_base 12: mod_base = OTHER; note = 2'O-methyl uridine
  modified_base 13: mod_base = OTHER; note = 2'O-methyl cytidine
  modified_base 14: mod_base = OTHER; note = 2'-fluoro uridine
  modified_base 15: mod_base = OTHER; note = 2'O-methyl guanosine
  modified_base 16: mod_base = OTHER; note = 2'-fluoro cytidine
  modified_base 17: mod_base = OTHER; note = 2'O-methyl cytidine
  modified_base 18: mod_base = OTHER; note = 2'O-methyl uridine
  modified_base 19: mod_base = OTHER; note = 2'O-methyl guanosine
  modified_base 20: mod_base = OTHER; note = 2'O-methyl cytidine
  modified_base 21: mod_base = OTHER; note = 2'O-methyl cytidine phosphorothioate
  modified_base 22: mod_base = OTHER; note = 2'O-methyl uridine phosphorothioate
  modified_base 23: mod_base = OTHER; note = 2'O-methyl uridine
ttcataagtagtctgcctgcctt

SEQ ID NO: 460 - RNA, 23 nt, synthetic construct
  source 1..23: mol_type = other RNA
  modified_base 1: mod_base = OTHER; note = 5' vinyl phosphonate 2'O-methyl uridine phosphorothioate
  modified_base 2: mod_base = OTHER; note = 2'-fluoro adenosine phosphorothioate
  modified_base 3: mod_base = OTHER; note = 2'O-methyl adenosine
  modified_base 4: mod_base = OTHER; note = 2'O-methyl uridine
  modified_base 5: mod_base = OTHER; note = 2'O-methyl adenosine
  modified_base 6: mod_base = OTHER; note = 2'-fluoro uridine
  modified_base 7: mod_base = OTHER; note = 2'O-methyl cytidine
  modified_base 8: mod_base = OTHER; note = 2'O-methyl cytidine
  modified_base 9: mod_base = OTHER; note = 2'O-methyl cytidine
  modified_base 10: mod_base = OTHER; note = 2'O-methyl adenosine
  modified_base 11: mod_base = OTHER; note = 2'O-methyl cytidine
  modified_base 12: mod_base = OTHER; note = 2'O-methyl adenosine
  modified_base 13: mod_base = OTHER; note = 2'O-methyl guanosine
  modified_base 14: mod_base = OTHER; note = 2'-fluoro adenosine
  modified_base 15: mod_base = OTHER; note = 2'O-methyl adenosine
  modified_base 16: mod_base = OTHER; note = 2'-fluoro cytidine
  modified_base 17: mod_base = OTHER; note = 2'O-methyl cytidine
  modified_base 18: mod_base = OTHER; note = 2'O-methyl adenosine
  modified_base 19: mod_base = OTHER; note = 2'O-methyl adenosine
  modified_base 20: mod_base = OTHER; note = 2'O-methyl uridine
  modified_base 21: mod_base = OTHER; note = 2'O-methyl adenosine phosphorothioate
  modified_base 22: mod_base = OTHER; note = 2'O-methyl uridine phosphorothioate
  modified_base 23: mod_base = OTHER; note = 2'O-methyl uridine
taatatcccacagaaccaatatt

SEQ ID NO: 461 - RNA, 23 nt, synthetic construct
  source 1..23: mol_type = other RNA
  modified_base 1: mod_base = OTHER; note = 5' vinyl phosphonate 2'O-methyl adenosine phosphorothioate
  modified_base 2: mod_base = OTHER; note = 2'-fluoro uridine phosphorothioate
  modified_base 3: mod_base = OTHER; note = 2'O-methyl uridine
  modified_base 4: mod_base = OTHER; note = 2'O-methyl adenosine
  modified_base 5: mod_base = OTHER; note = 2'O-methyl adenosine
  modified_base 6: mod_base = OTHER; note = 2'-fluoro uridine
  modified_base 7: mod_base = OTHER; note = 2'O-methyl adenosine
  modified_base 8: mod_base = OTHER; note = 2'O-methyl uridine
  modified_base 9: mod_base = OTHER; note = 2'O-methyl cytidine
  modified_base 10: mod_base = OTHER; note = 2'O-methyl cytidine
  modified_base 11: mod_base = OTHER; note = 2'O-methyl cytidine
  modified_base 12: mod_base = OTHER; note = 2'O-methyl adenosine
  modified_base 13: mod_base = OTHER; note = 2'O-methyl cytidine
  modified_base 14: mod_base = OTHER; note = 2'-fluoro adenosine
  modified_base 15: mod_base = OTHER; note = 2'O-methyl guanosine
  modified_base 16: mod_base = OTHER; note = 2'-fluoro adenosine
  modified_base 17: mod_base = OTHER; note = 2'O-methyl adenosine
  modified_base 18: mod_base = OTHER; note = 2'O-methyl cytidine
  modified_base 19: mod_base = OTHER; note = 2'O-methyl cytidine
  modified_base 20: mod_base = OTHER; note = 2'O-methyl adenosine
  modified_base 21: mod_base = OTHER; note = 2'O-methyl adenosine phosphorothioate
  modified_base 22: mod_base = OTHER; note = 2'O-methyl uridine phosphorothioate
  modified_base 23: mod_base = OTHER; note = 2'O-methyl uridine
attaatatcccacagaaccaatt

SEQ ID NO: 462 - RNA, 23 nt, synthetic construct
  source 1..23: mol_type = other RNA
  modified_base 1: mod_base = OTHER; note = 5' vinyl phosphonate 2'O-methyl uridine phosphorothioate
  modified_base 2: mod_base = OTHER; note = 2'-fluoro uridine phosphorothioate
  modified_base 3: mod_base = OTHER; note = 2'O-methyl adenosine
  modified_base 4: mod_base = OTHER; note = 2'O-methyl uridine
  modified_base 5: mod_base = OTHER; note = 2'O-methyl uridine
  modified_base 6: mod_base = OTHER; note = 2'-fluoro adenosine
  modified_base 7: mod_base = OTHER; note = 2'O-methyl adenosine
  modified_base 8: mod_base = OTHER; note = 2'O-methyl uridine
  modified_base 9: mod_base = OTHER; note = 2'O-methyl adenosine
  modified_base 10: mod_base = OTHER; note = 2'O-methyl uridine
  modified_base 11: mod_base = OTHER; note = 2'O-methyl cytidine
  modified_base 12: mod_base = OTHER; note = 2'O-methyl cytidine
  modified_base 13: mod_base = OTHER; note = 2'O-methyl cytidine
  modified_base 14: mod_base = OTHER; note = 2'-fluoro adenosine
  modified_base 15: mod_base = OTHER; note = 2'O-methyl cytidine
  modified_base 16: mod_base = OTHER; note = 2'-fluoro adenosine
  modified_base 17: mod_base = OTHER; note = 2'O-methyl guanosine
  modified_base 18: mod_base = OTHER; note = 2'O-methyl adenosine
  modified_base 19: mod_base = OTHER; note = 2'O-methyl adenosine
  modified_base 20: mod_base = OTHER; note = 2'O-methyl cytidine
  modified_base 21: mod_base = OTHER; note = 2'O-methyl cytidine phosphorothioate
  modified_base 22: mod_base = OTHER; note = 2'O-methyl uridine phosphorothioate
  modified_base 23: mod_base = OTHER; note = 2'O-methyl uridine
ttattaatatcccacagaacctt

SEQ ID NO: 463 - RNA, 23 nt, synthetic construct
  source 1..23: mol_type = other RNA
  modified_base 1: mod_base = OTHER; note = 5' vinyl phosphonate 2'O-methyl uridine phosphorothioate
  modified_base 2: mod_base = OTHER; note = 2'-fluoro guanosine phosphorothioate
  modified_base 3: mod_base = OTHER; note = 2'O-methyl uridine
  modified_base 4: mod_base = OTHER; note = 2'O-methyl uridine
  modified_base 5: mod_base = OTHER; note = 2'O-methyl guanosine
  modified_base 6: mod_base = OTHER; note = 2'-fluoro cytidine
  modified_base 7: mod_base = OTHER; note = 2'O-methyl uridine
  modified_base 8: mod_base = OTHER; note = 2'O-methyl guanosine
  modified_base 9: mod_base = OTHER; note = 2'O-methyl cytidine
  modified_base 10: mod_base = OTHER; note = 2'O-methyl adenosine
  modified_base 11: mod_base = OTHER; note = 2'O-methyl guanosine
  modified_base 12: mod_base = OTHER; note = 2'O-methyl uridine
  modified_base 13: mod_base = OTHER; note = 2'O-methyl cytidine
  modified_base 14: mod_base = OTHER; note = 2'-fluoro uridine
  modified_base 15: mod_base = OTHER; note = 2'O-methyl adenosine
  modified_base 16: mod_base = OTHER; note = 2'-fluoro cytidine
  modified_base 17: mod_base = OTHER; note = 2'O-methyl cytidine
  modified_base 18: mod_base = OTHER; note = 2'O-methyl adenosine
  modified_base 19: mod_base = OTHER; note = 2'O-methyl cytidine
  modified_base 20: mod_base = OTHER; note = 2'O-methyl adenosine
  modified_base 21: mod_base = OTHER; note = 2'O-methyl uridine phosphorothioate
  modified_base 22: mod_base = OTHER; note = 2'O-methyl uridine phosphorothioate
  modified_base 23: mod_base = OTHER; note = 2'O-methyl uridine
tgttgctgcagtctaccacattt

SEQ ID NO: 464 - RNA, 23 nt, synthetic construct
  source 1..23: mol_type = other RNA
  modified_base 1: mod_base = OTHER; note = 5' vinyl phosphonate 2'O-methyl adenosine phosphorothioate
  modified_base 2: mod_base = OTHER; note = 2'-fluoro uridine phosphorothioate
  modified_base 3: mod_base = OTHER; note = 2'O-methyl cytidine
  modified_base 4: mod_base = OTHER; note = 2'O-methyl uridine
  modified_base 5: mod_base = OTHER; note = 2'O-methyl cytidine
  modified_base 6: mod_base = OTHER; note = 2'-fluoro uridine
  modified_base 7: mod_base = OTHER; note = 2'O-methyl uridine
  modified_base 8: mod_base = OTHER; note = 2'O-methyl cytidine
  modified_base 9: mod_base = OTHER; note = 2'O-methyl uridine
  modified_base 10: mod_base = OTHER; note = 2'O-methyl cytidine
  modified_base 11: mod_base = OTHER; note = 2'O-methyl uridine
  modified_base 12: mod_base = OTHER; note = 2'O-methyl guanosine
  modified_base 13: mod_base = OTHER; note = 2'O-methyl uridine
  modified_base 14: mod_base = OTHER; note = 2'-fluoro uridine
  modified_base 15: mod_base = OTHER; note = 2'O-methyl guanosine
  modified_base 16: mod_base = OTHER; note = 2'-fluoro cytidine
  modified_base 17: mod_base = OTHER; note = 2'O-methyl uridine
  modified_base 18: mod_base = OTHER; note = 2'O-methyl guanosine
  modified_base 19: mod_base = OTHER; note = 2'O-methyl cytidine
  modified_base 20: mod_base = OTHER; note = 2'O-methyl adenosine
  modified_base 21: mod_base = OTHER; note = 2'O-methyl guanosine phosphorothioate
  modified_base 22: mod_base = OTHER; note = 2'O-methyl uridine phosphorothioate
  modified_base 23: mod_base = OTHER; note = 2'O-methyl uridine
atctcttctctgttgctgcagtt

SEQ ID NO: 465 - RNA, 23 nt, synthetic construct
  source 1..23: mol_type = other RNA
  modified_base 1: mod_base = OTHER; note = 5' vinyl phosphonate 2'O-methyl adenosine phosphorothioate
  modified_base 2: mod_base = OTHER; note = 2'-fluoro cytidine phosphorothioate
  modified_base 3: mod_base = OTHER; note = 2'O-methyl uridine
  modified_base 4: mod_base = OTHER; note = 2'O-methyl uridine
  modified_base 5: mod_base = OTHER; note = 2'O-methyl cytidine
  modified_base 6: mod_base = OTHER; note = 2'-fluoro uridine
  modified_base 7: mod_base = OTHER; note = 2'O-methyl uridine
  modified_base 8: mod_base = OTHER; note = 2'O-methyl uridine
  modified_base 9: mod_base = OTHER; note = 2'O-methyl cytidine
  modified_base 10: mod_base = OTHER; note = 2'O-methyl uridine
  modified_base 11: mod_base = OTHER; note = 2'O-methyl uridine
  modified_base 12: mod_base = OTHER; note = 2'O-methyl cytidine
  modified_base 13: mod_base = OTHER; note = 2'O-methyl adenosine
  modified_base 14: mod_base = OTHER; note = 2'-fluoro cytidine
  modified_base 15: mod_base = OTHER; note = 2'O-methyl cytidine
  modified_base 16: mod_base = OTHER; note = 2'-fluoro uridine
  modified_base 17: mod_base = OTHER; note = 2'O-methyl guanosine
  modified_base 18: mod_base = OTHER; note = 2'O-methyl adenosine
  modified_base 19: mod_base = OTHER; note = 2'O-methyl uridine
  modified_base 20: mod_base = OTHER; note = 2'O-methyl uridine
  modified_base 21: mod_base = OTHER; note = 2'O-methyl uridine phosphorothioate
  modified_base 22: mod_base = OTHER; note = 2'O-methyl uridine phosphorothioate
  modified_base 23: mod_base = OTHER; note = 2'O-methyl uridine
acttctttcttcacctgattttt

SEQ ID NO: 466 - RNA, 23 nt, synthetic construct
  source 1..23: mol_type = other RNA
  modified_base 1: mod_base = OTHER; note = 5' vinyl phosphonate 2'O-methyl adenosine phosphorothioate
  modified_base 2: mod_base = OTHER; note = 2'-fluoro cytidine phosphorothioate
  modified_base 3: mod_base = OTHER; note = 2'O-methyl adenosine
  modified_base 4: mod_base = OTHER; note = 2'O-methyl uridine
  modified_base 5: mod_base = OTHER; note = 2'O-methyl cytidine
  modified_base 6: mod_base = OTHER; note = 2'-fluoro adenosine
  modified_base 7: mod_base = OTHER; note = 2'O-methyl cytidine
  modified_base 8: mod_base = OTHER; note = 2'O-methyl cytidine
  modified_base 9: mod_base = OTHER; note = 2'O-methyl cytidine
  modified_base 10: mod_base = OTHER; note = 2'O-methyl adenosine
  modified_base 11: mod_base = OTHER; note = 2'O-methyl cytidine
  modified_base 12: mod_base = OTHER; note = 2'O-methyl uridine
  modified_base 13: mod_base = OTHER; note = 2'O-methyl uridine
  modified_base 14: mod_base = OTHER; note = 2'-fluoro cytidine
  modified_base 15: mod_base = OTHER; note = 2'O-methyl uridine
  modified_base 16: mod_base = OTHER; note = 2'-fluoro uridine
  modified_base 17: mod_base = OTHER; note = 2'O-methyl uridine
  modified_base 18: mod_base = OTHER; note = 2'O-methyl cytidine
  modified_base 19: mod_base = OTHER; note = 2'O-methyl uridine
  modified_base 20: mod_base = OTHER; note = 2'O-methyl uridine
  modified_base 21: mod_base = OTHER; note = 2'O-methyl cytidine phosphorothioate
  modified_base 22: mod_base = OTHER; note = 2'O-methyl uridine phosphorothioate
  modified_base 23: mod_base = OTHER; note = 2'O-methyl uridine
acatcacccacttctttcttctt

SEQ ID NO: 467 - RNA, 23 nt, synthetic construct
  source 1..23: mol_type = other RNA
  modified_base 1: mod_base = OTHER; note = 5' vinyl phosphonate 2'O-methyl uridine phosphorothioate
  modified_base 2: mod_base = OTHER; note = 2'-fluoro guanosine phosphorothioate
  modified_base 3: mod_base = OTHER; note = 2'O-methyl guanosine
  modified_base 4: mod_base = OTHER; note = 2'O-methyl uridine
  modified_base 5: mod_base = OTHER; note = 2'O-methyl adenosine
  modified_base 6: mod_base = OTHER; note = 2'-fluoro adenosine
  modified_base 7: mod_base = OTHER; note = 2'O-methyl uridine
  modified_base 8: mod_base = OTHER; note = 2'O-methyl cytidine
  modified_base 9: mod_base = OTHER; note = 2'O-methyl uridine
  modified_base 10: mod_base = OTHER; note = 2'O-methyl cytidine
  modified_base 11: mod_base = OTHER; note = 2'O-methyl uridine
  modified_base 12: mod_base = OTHER; note = 2'O-methyl uridine
  modified_base 13: mod_base = OTHER; note = 2'O-methyl cytidine
  modified_base 14: mod_base = OTHER; note = 2'-fluoro adenosine
  modified_base 15: mod_base = OTHER; note = 2'O-methyl uridine
  modified_base 16: mod_base = OTHER; note = 2'-fluoro cytidine
  modified_base 17: mod_base = OTHER; note = 2'O-methyl cytidine
  modified_base 18: mod_base = OTHER; note = 2'O-methyl uridine
  modified_base 19: mod_base = OTHER; note = 2'O-methyl uridine
  modified_base 20: mod_base = OTHER; note = 2'O-methyl guanosine
  modified_base 21: mod_base = OTHER; note = 2'O-methyl guanosine phosphorothioate
  modified_base 22: mod_base = OTHER; note = 2'O-methyl uridine phosphorothioate
  modified_base 23: mod_base = OTHER; note = 2'O-methyl uridine
tggtaatctcttcatccttggtt

SEQ ID NO: 468 - RNA, 23 nt, synthetic construct
  source 1..23: mol_type = other RNA
  modified_base 1: mod_base = OTHER; note = 5' vinyl phosphonate 2'O-methyl adenosine phosphorothioate
  modified_base 2: mod_base = OTHER; note = 2'-fluoro adenosine phosphorothioate
  modified_base 3: mod_base = OTHER; note = 2'O-methyl adenosine
  modified_base 4: mod_base = OTHER; note = 2'O-methyl uridine
  modified_base 5: mod_base = OTHER; note = 2'O-methyl guanosine
  modified_base 6: mod_base = OTHER; note = 2'-fluoro uridine
  modified_base 7: mod_base = OTHER; note = 2'O-methyl cytidine
  modified_base 8: mod_base = OTHER; note = 2'O-methyl uridine
  modified_base 9: mod_base = OTHER; note = 2'O-methyl uridine
  modified_base 10: mod_base = OTHER; note = 2'O-methyl guanosine
  modified_base 11: mod_base = OTHER; note = 2'O-methyl guanosine
  modified_base 12: mod_base = OTHER; note = 2'O-methyl uridine
  modified_base 13: mod_base = OTHER; note = 2'O-methyl adenosine
  modified_base 14: mod_base = OTHER; note = 2'-fluoro adenosine
  modified_base 15: mod_base = OTHER; note = 2'O-methyl uridine
  modified_base 16: mod_base = OTHER; note = 2'-fluoro cytidine
  modified_base 17: mod_base = OTHER; note = 2'O-methyl uridine
  modified_base 18: mod_base = OTHER; note = 2'O-methyl cytidine
  modified_base 19: mod_base = OTHER; note = 2'O-methyl uridine
  modified_base 20: mod_base = OTHER; note = 2'O-methyl uridine
  modified_base 21: mod_base = OTHER; note = 2'O-methyl cytidine phosphorothioate
  modified_base 22: mod_base = OTHER; note = 2'O-methyl uridine phosphorothioate
  modified_base 23: mod_base = OTHER; note = 2'O-methyl uridine
aaatgtcttggtaatctcttctt

SEQ ID NO: 469 - RNA, 23 nt, synthetic construct
  source 1..23: mol_type = other RNA
  modified_base 1: mod_base = OTHER; note = 5' vinyl phosphonate 2'O-methyl uridine phosphorothioate
  modified_base 2: mod_base = OTHER; note = 2'-fluoro cytidine phosphorothioate
  modified_base 3: mod_base = OTHER; note = 2'O-methyl adenosine
  modified_base 4: mod_base = OTHER; note = 2'O-methyl adenosine
  modified_base 5: mod_base = OTHER; note = 2'O-methyl adenosine
  modified_base 6: mod_base = OTHER; note = 2'-fluoro uridine
  modified_base 7: mod_base = OTHER; note = 2'O-methyl guanosine
  modified_base 8: mod_base = OTHER; note = 2'O-methyl uridine
  modified_base 9: mod_base = OTHER; note = 2'O-methyl cytidine
  modified_base 10: mod_base = OTHER; note = 2'O-methyl uridine
  modified_base 11: mod_base = OTHER; note = 2'O-methyl uridine
  modified_base 12: mod_base = OTHER; note = 2'O-methyl guanosine
  modified_base 13: mod_base = OTHER; note = 2'O-methyl guanosine
  modified_base 14: mod_base = OTHER; note = 2'-fluoro uridine
  modified_base 15: mod_base = OTHER; note = 2'O-methyl adenosine
  modified_base 16: mod_base = OTHER; note = 2'-fluoro adenosine
  modified_base 17: mod_base = OTHER; note = 2'O-methyl uridine
  modified_base 18: mod_base = OTHER; note = 2'O-methyl cytidine
  modified_base 19: mod_base = OTHER; note = 2'O-methyl uridine
  modified_base 20: mod_base = OTHER; note = 2'O-methyl cytidine
  modified_base 21: mod_base = OTHER; note = 2'O-methyl uridine phosphorothioate
  modified_base 22: mod_base = OTHER; note = 2'O-methyl uridine phosphorothioate
  modified_base 23: mod_base = OTHER; note = 2'O-methyl uridine
tcaaatgtcttggtaatctcttt

SEQ ID NO: 470 - RNA, 23 nt, synthetic construct
  source 1..23: mol_type = other RNA
  modified_base 1: mod_base = OTHER; note = 5' vinyl phosphonate 2'O-methyl adenosine phosphorothioate
  modified_base 2: mod_base = OTHER; note = 2'-fluoro cytidine phosphorothioate
  modified_base 3: mod_base = OTHER; note = 2'O-methyl cytidine
  modified_base 4: mod_base = OTHER; note = 2'O-methyl uridine
  modified_base 5: mod_base = OTHER; note = 2'O-methyl cytidine
  modified_base 6: mod_base = OTHER; note = 2'-fluoro adenosine
  modified_base 7: mod_base = OTHER; note = 2'O-methyl adenosine
  modified_base 8: mod_base = OTHER; note = 2'O-methyl adenosine
  modified_base 9: mod_base = OTHER; note = 2'O-methyl uridine
  modified_base 10: mod_base = OTHER; note = 2'O-methyl guanosine
  modified_base 11: mod_base = OTHER; note = 2'O-methyl uridine
  modified_base 12: mod_base = OTHER; note = 2'O-methyl cytidine
  modified_base 13: mod_base = OTHER; note = 2'O-methyl uridine
  modified_base 14: mod_base = OTHER; note = 2'-fluoro uridine
  modified_base 15: mod_base = OTHER; note = 2'O-methyl guanosine
  modified_base 16: mod_base = OTHER; note = 2'-fluoro guanosine
  modified_base 17: mod_base = OTHER; note = 2'O-methyl uridine
  modified_base 18: mod_base = OTHER; note = 2'O-methyl adenosine
  modified_base 19: mod_base = OTHER; note = 2'O-methyl adenosine
  modified_base 20: mod_base = OTHER; note = 2'O-methyl uridine
  modified_base 21: mod_base = OTHER; note = 2'O-methyl cytidine phosphorothioate
  modified_base 22: mod_base = OTHER; note = 2'O-methyl uridine phosphorothioate
  modified_base 23: mod_base = OTHER; note = 2'O-methyl uridine
acctcaaatgtcttggtaatctt

SEQ ID NO: 471 - RNA, 23 nt, synthetic construct
  source 1..23: mol_type = other RNA
  modified_base 1: mod_base = OTHER; note = 5' vinyl phosphonate 2'O-methyl uridine phosphorothioate
  modified_base 2: mod_base = OTHER; note = 2'-fluoro uridine phosphorothioate
  modified_base 3: mod_base = OTHER; note = 2'O-methyl guanosine
  modified_base 4: mod_base = OTHER; note = 2'O-methyl adenosine
  modified_base 5: mod_base = OTHER; note = 2'O-methyl cytidine
  modified_base 6: mod_base = OTHER; note = 2'-fluoro cytidine
  modified_base 7: mod_base = OTHER; note = 2'O-methyl uridine
  modified_base 8: mod_base = OTHER; note = 2'O-methyl cytidine
  modified_base 9: mod_base = OTHER; note = 2'O-methyl adenosine
  modified_base 10: mod_base = OTHER; note = 2'O-methyl adenosine
  modified_base 11: mod_base = OTHER; note = 2'O-methyl adenosine
  modified_base 12: mod_base = OTHER; note = 2'O-methyl uridine
  modified_base 13: mod_base = OTHER; note = 2'O-methyl guanosine
  modified_base 14: mod_base = OTHER; note = 2'-fluoro uridine
  modified_base 15: mod_base = OTHER; note = 2'O-methyl cytidine
  modified_base 16: mod_base = OTHER; note = 2'-fluoro uridine
  modified_base 17: mod_base = OTHER; note = 2'O-methyl uridine
  modified_base 18: mod_base = OTHER; note = 2'O-methyl guanosine
  modified_base 19: mod_base = OTHER; note = 2'O-methyl guanosine
  modified_base 20: mod_base = OTHER; note = 2'O-methyl uridine
  modified_base 21: mod_base = OTHER; note = 2'O-methyl adenosine phosphorothioate
  modified_base 22: mod_base = OTHER; note = 2'O-methyl uridine phosphorothioate
  modified_base 23: mod_base = OTHER; note = 2'O-methyl uridine
ttgacctcaaatgtcttggtatt

SEQ ID NO: 472 - RNA, 23 nt, synthetic construct
  source 1..23: mol_type = other RNA
  modified_base 1: mod_base = OTHER; note = 5' vinyl phosphonate 2'O-methyl uridine phosphorothioate
  modified_base 2: mod_base = OTHER; note = 2'-fluoro guanosine phosphorothioate
  modified_base 3: mod_base = OTHER; note = 2'O-methyl uridine
  modified_base 4: mod_base = OTHER; note = 2'O-methyl uridine
  modified_base 5: mod_base = OTHER; note = 2'O-methyl guanosine
  modified_base 6: mod_base = OTHER; note = 2'-fluoro adenosine
  modified_base 7: mod_base = OTHER; note = 2'O-methyl cytidine
  modified_base 8: mod_base = OTHER; note = 2'O-methyl cytidine
  modified_base 9: mod_base = OTHER; note = 2'O-methyl uridine
  modified_base 10: mod_base = OTHER; note = 2'O-methyl cytidine
  modified_base 11: mod_base = OTHER; note = 2'O-methyl adenosine
  modified_base 12: mod_base = OTHER; note = 2'O-methyl adenosine
  modified_base 13: mod_base = OTHER; note = 2'O-methyl adenosine
  modified_base 14: mod_base = OTHER; note = 2'-fluoro uridine
  modified_base 15: mod_base = OTHER; note = 2'O-methyl guanosine
  modified_base 16: mod_base = OTHER; note = 2'-fluoro uridine
  modified_base 17: mod_base = OTHER; note = 2'O-methyl cytidine
  modified_base 18: mod_base = OTHER; note = 2'O-methyl uridine
  modified_base 19: mod_base = OTHER; note = 2'O-methyl uridine
  modified_base 20: mod_base = OTHER; note = 2'O-methyl guanosine
  modified_base 21: mod_base = OTHER; note = 2'O-methyl guanosine phosphorothioate
  modified_base 22: mod_base = OTHER; note = 2'O-methyl uridine phosphorothioate
  modified_base 23: mod_base = OTHER; note = 2'O-methyl uridine
tgttgacctcaaatgtcttggtt

SEQ ID NO: 473 - RNA, 23 nt, synthetic construct
  source 1..23: mol_type = other RNA
  modified_base 1: mod_base = OTHER; note = 5' vinyl phosphonate 2'O-methyl uridine phosphorothioate
  modified_base 2: mod_base = OTHER; note = 2'-fluoro guanosine phosphorothioate
  modified_base 3: mod_base = OTHER; note = 2'O-methyl uridine
  modified_base 4: mod_base = OTHER; note = 2'O-methyl cytidine
  modified_base 5: mod_base = OTHER; note = 2'O-methyl cytidine
  modified_base 6: mod_base = OTHER; note = 2'-fluoro uridine
  modified_base 7: mod_base = OTHER; note = 2'O-methyl adenosine
  modified_base 8: mod_base = OTHER; note = 2'O-methyl guanosine
  modified_base 9: mod_base = OTHER; note = 2'O-methyl guanosine
  modified_base 10: mod_base = OTHER; note = 2'O-methyl adenosine
  modified_base 11: mod_base = OTHER; note = 2'O-methyl uridine
  modified_base 12: mod_base = OTHER; note = 2'O-methyl guanosine
  modified_base 13: mod_base = OTHER; note = 2'O-methyl uridine
  modified_base 14: mod_base = OTHER; note = 2'-fluoro uridine
  modified_base 15: mod_base = OTHER; note = 2'O-methyl guanosine
  modified_base 16: mod_base = OTHER; note = 2'-fluoro adenosine
  modified_base 17: mod_base = OTHER; note = 2'O-methyl cytidine
  modified_base 18: mod_base = OTHER; note = 2'O-methyl cytidine
  modified_base 19: mod_base = OTHER; note = 2'O-methyl uridine
  modified_base 20: mod_base = OTHER; note = 2'O-methyl cytidine
  modified_base 21: mod_base = OTHER; note = 2'O-methyl adenosine phosphorothioate
  modified_base 22: mod_base = OTHER; note = 2'O-methyl uridine phosphorothioate
  modified_base 23: mod_base = OTHER; note = 2'O-methyl uridine
tgtcctaggatgttgacctcatt

SEQ ID NO: 474 - RNA, 23 nt, synthetic construct
  source 1..23: mol_type = other RNA
  modified_base 1: mod_base = OTHER; note = 5' vinyl phosphonate 2'O-methyl adenosine phosphorothioate
  modified_base 2: mod_base = OTHER; note = 2'-fluoro adenosine phosphorothioate
  modified_base 3: mod_base = OTHER; note = 2'O-methyl uridine
  modified_base 4: mod_base = OTHER; note = 2'O-methyl guanosine
  modified_base 5: mod_base = OTHER; note = 2'O-methyl uridine
  modified_base 6: mod_base = OTHER; note = 2'-fluoro cytidine
  modified_base 7: mod_base = OTHER; note = 2'O-methyl cytidine
  modified_base 8: mod_base = OTHER; note = 2'O-methyl uridine
  modified_base 9: mod_base = OTHER; note = 2'O-methyl adenosine
  modified_base 10: mod_base = OTHER; note = 2'O-methyl guanosine
  modified_base 11: mod_base = OTHER; note = 2'O-methyl guanosine
  modified_base 12: mod_base = OTHER; note = 2'O-methyl adenosine
  modified_base 13: mod_base = OTHER; note = 2'O-methyl uridine
  modified_base 14: mod_base = OTHER; note = 2'-fluoro guanosine
  modified_base 15: mod_base = OTHER; note = 2'O-methyl uridine
  modified_base 16: mod_base = OTHER; note = 2'-fluoro uridine
  modified_base 17: mod_base = OTHER; note = 2'O-methyl guanosine
  modified_base 18: mod_base = OTHER; note = 2'O-methyl adenosine
  modified_base 19: mod_base = OTHER; note = 2'O-methyl cytidine
  modified_base 20: mod_base = OTHER; note = 2'O-methyl cytidine
  modified_base 21: mod_base = OTHER; note = 2'O-methyl uridine phosphorothioate
  modified_base 22: mod_base = OTHER; note = 2'O-methyl uridine phosphorothioate
  modified_base 23: mod_base = OTHER; note = 2'O-methyl uridine
aatgtcctaggatgttgaccttt

SEQ ID NO: 475 - RNA, 23 nt, synthetic construct
  source 1..23: mol_type = other RNA
  modified_base 1: mod_base = OTHER; note = 5' vinyl phosphonate 2'O-methyl adenosine phosphorothioate
  modified_base 2: mod_base = OTHER; note = 2'-fluoro adenosine phosphorothioate
  modified_base 3: mod_base = OTHER; note = 2'O-methyl adenosine
  modified_base 4: mod_base = OTHER; note = 2'O-methyl adenosine
  modified_base 5: mod_base = OTHER; note = 2'O-methyl uridine
  modified_base 6: mod_base = OTHER; note = 2'-fluoro guanosine
  modified_base 7: mod_base = OTHER; note = 2'O-methyl uridine
  modified_base 8: mod_base = OTHER; note = 2'O-methyl cytidine
  modified_base 9: mod_base = OTHER; note = 2'O-methyl cytidine
  modified_base 10: mod_base = OTHER; note = 2'O-methyl uridine
  modified_base 11: mod_base = OTHER; note = 2'O-methyl adenosine
  modified_base 12: mod_base = OTHER; note = 2'O-methyl guanosine
  modified_base 13: mod_base = OTHER; note = 2'O-methyl guanosine
  modified_base 14: mod_base = OTHER; note = 2'-fluoro adenosine
  modified_base 15: mod_base = OTHER; note = 2'O-methyl uridine
  modified_base 16: mod_base = OTHER; note = 2'-fluoro guanosine
  modified_base 17: mod_base = OTHER; note = 2'O-methyl uridine
  modified_base 18: mod_base = OTHER; note = 2'O-methyl uridine
  modified_base 19: mod_base = OTHER; note = 2'O-methyl guanosine
  modified_base 20: mod_base = OTHER; note = 2'O-methyl adenosine
  modified_base 21: mod_base = OTHER; note = 2'O-methyl cytidine phosphorothioate
  modified_base 22: mod_base = OTHER; note = 2'O-methyl uridine phosphorothioate
  modified_base 23: mod_base = OTHER; note = 2'O-methyl uridine
aaaatgtcctaggatgttgactt

SEQ ID NO: 476 - RNA, 23 nt, synthetic construct
  source 1..23: mol_type = other RNA
  modified_base 1: mod_base = OTHER; note = 5' vinyl phosphonate 2'O-methyl adenosine phosphorothioate
  modified_base 2: mod_base = OTHER; note = 2'-fluoro adenosine phosphorothioate
  modified_base 3: mod_base = OTHER; note = 2'O-methyl adenosine
  modified_base 4: mod_base = OTHER; note = 2'O-methyl adenosine
  modified_base 5: mod_base = OTHER; note = 2'O-methyl adenosine
  modified_base 6: mod_base = OTHER; note = 2'-fluoro uridine
  modified_base 7: mod_base = OTHER; note = 2'O-methyl guanosine
  modified_base 8: mod_base = OTHER; note = 2'O-methyl uridine
  modified_base 9: mod_base = OTHER; note = 2'O-methyl cytidine
  modified_base 10: mod_base = OTHER; note = 2'O-methyl cytidine
  modified_base 11: mod_base = OTHER; note = 2'O-methyl uridine
  modified_base 12: mod_base = OTHER; note = 2'O-methyl adenosine
  modified_base 13: mod_base = OTHER; note = 2'O-methyl guanosine
  modified_base 14: mod_base = OTHER; note = 2'-fluoro guanosine
  modified_base 15: mod_base = OTHER; note = 2'O-methyl adenosine
  modified_base 16: mod_base = OTHER; note = 2'-fluoro uridine
  modified_base 17: mod_base = OTHER; note = 2'O-methyl guanosine
  modified_base 18: mod_base = OTHER; note = 2'O-methyl uridine
  modified_base 19: mod_base = OTHER; note = 2'O-methyl uridine
  modified_base 20: mod_base = OTHER; note = 2'O-methyl guanosine
  modified_base 21: mod_base = OTHER; note = 2'O-methyl adenosine phosphorothioate
  modified_base 22: mod_base = OTHER; note = 2'O-methyl uridine phosphorothioate
  modified_base 23: mod_base = OTHER; note = 2'O-methyl uridine
aaaaatgtcctaggatgttgatt

SEQ ID NO: 477 - RNA, 23 nt, synthetic construct
  source 1..23: mol_type = other RNA
  modified_base 1: mod_base = OTHER; note = 5' vinyl phosphonate 2'O-methyl adenosine phosphorothioate
  modified_base 2: mod_base = OTHER; note = 2'-fluoro uridine phosphorothioate
  modified_base 3: mod_base = OTHER; note = 2'O-methyl cytidine
  modified_base 4: mod_base = OTHER; note = 2'O-methyl cytidine
  modified_base 5: mod_base = OTHER; note = 2'O-methyl adenosine
  modified_base 6: mod_base = OTHER; note = 2'-fluoro adenosine
  modified_base 7: mod_base = OTHER; note = 2'O-methyl adenosine
  modified_base 8: mod_base = OTHER; note = 2'O-methyl adenosine
  modified_base 9: mod_base = OTHER; note = 2'O-methyl adenosine
  modified_base 10: mod_base = OTHER; note = 2'O-methyl uridine
  modified_base 11: mod_base = OTHER; note = 2'O-methyl guanosine
  modified_base 12: mod_base = OTHER; note = 2'O-methyl uridine
  modified_base 13: mod_base = OTHER; note = 2'O-methyl cytidine
  modified_base 14: mod_base = OTHER; note = 2'-fluoro cytidine
  modified_base 15: mod_base = OTHER; note = 2'O-methyl uridine
  modified_base 16: mod_base = OTHER; note = 2'-fluoro adenosine
  modified_base 17: mod_base = OTHER; note = 2'O-methyl guanosine
  modified_base 18: mod_base = OTHER; note = 2'O-methyl guanosine
  modified_base 19: mod_base = OTHER; note = 2'O-methyl adenosine
  modified_base 20: mod_base = OTHER; note = 2'O-methyl uridine
  modified_base 21: mod_base = OTHER; note = 2'O-methyl guanosine phosphorothioate
  modified_base 22: mod_base = OTHER; note = 2'O-methyl uridine phosphorothioate
  modified_base 23: mod_base = OTHER; note = 2'O-methyl uridine
atccaaaaatgtcctaggatgtt

SEQ ID NO: 478 - RNA, 23 nt, synthetic construct
  source 1..23: mol_type = other RNA
  modified_base 1: mod_base = OTHER; note = 5' vinyl phosphonate 2'O-methyl uridine phosphorothioate
  modified_base 2: mod_base = OTHER; note = 2'-fluoro guanosine phosphorothioate
  modified_base 3: mod_base = OTHER; note = 2'O-methyl adenosine
  modified_base 4: mod_base = OTHER; note = 2'O-methyl uridine
  modified_base 5: mod_base = OTHER; note = 2'O-methyl cytidine
  modified_base 6: mod_base = OTHER; note = 2'-fluoro cytidine
  modified_base 7: mod_base = OTHER; note = 2'O-methyl adenosine
  modified_base 8: mod_base = OTHER; note = 2'O-methyl adenosine
  modified_base 9: mod_base = OTHER; note = 2'O-methyl adenosine
  modified_base 10: mod_base = OTHER; note = 2'O-methyl adenosine
  modified_base 11: mod_base = OTHER; note = 2'O-methyl adenosine
  modified_base 12: mod_base = OTHER; note = 2'O-methyl uridine
  modified_base 13: mod_base = OTHER; note = 2'O-methyl guanosine
  modified_base 14: mod_base = OTHER; note = 2'-fluoro uridine
  modified_base 15: mod_base = OTHER; note = 2'O-methyl cytidine
  modified_base 16: mod_base = OTHER; note = 2'-fluoro cytidine
  modified_base 17: mod_base = OTHER; note = 2'O-methyl uridine
  modified_base 18: mod_base = OTHER; note = 2'O-methyl adenosine
  modified_base 19: mod_base = OTHER; note = 2'O-methyl guanosine
  modified_base 20: mod_base = OTHER; note = 2'O-methyl guanosine
  modified_base 21: mod_base = OTHER; note = 2'O-methyl adenosine phosphorothioate
  modified_base 22: mod_base = OTHER; note = 2'O-methyl uridine phosphorothioate
  modified_base 23: mod_base = OTHER; note = 2'O-methyl uridine
tgatccaaaaatgtcctaggatt

SEQ ID NO: 479 - RNA, 23 nt, synthetic construct
  source 1..23: mol_type = other RNA
  modified_base 1: mod_base = OTHER; note = 5' vinyl phosphonate 2'O-methyl uridine phosphorothioate
  modified_base 2: mod_base = OTHER; note = 2'-fluoro uridine phosphorothioate
  modified_base 3: mod_base = OTHER; note = 2'O-methyl uridine
  modified_base 4: mod_base = OTHER; note = 2'O-methyl guanosine
  modified_base 5: mod_base = OTHER; note = 2'O-methyl uridine
  modified_base 6: mod_base = OTHER; note = 2'-fluoro guanosine
  modified_base 7: mod_base = OTHER; note = 2'O-methyl adenosine
  modified_base 8: mod_base = OTHER; note = 2'O-methyl uridine
  modified_base 9: mod_base = OTHER; note = 2'O-methyl cytidine
  modified_base 10: mod_base = OTHER; note = 2'O-methyl cytidine
  modified_base 11: mod_base = OTHER; note = 2'O-methyl adenosine
  modified_base 12: mod_base = OTHER; note = 2'O-methyl adenosine
  modified_base 13: mod_base = OTHER; note = 2'O-methyl adenosine
  modified_base 14: mod_base = OTHER; note = 2'-fluoro adenosine
  modified_base 15: mod_base = OTHER; note = 2'O-methyl adenosine
  modified_base 16: mod_base = OTHER; note = 2'-fluoro uridine
  modified_base 17: mod_base = OTHER; note = 2'O-methyl guanosine
  modified_base 18: mod_base = OTHER; note = 2'O-methyl uridine
  modified_base 19: mod_base = OTHER; note = 2'O-methyl cytidine
  modified_base 20: mod_base = OTHER; note = 2'O-methyl cytidine
  modified_base 21: mod_base = OTHER; note = 2'O-methyl uridine phosphorothioate
  modified_base 22: mod_base = OTHER; note = 2'O-methyl uridine phosphorothioate
  modified_base 23: mod_base = OTHER; note = 2'O-methyl uridine
tttgtgatccaaaaatgtccttt

SEQ ID NO: 480 - RNA, 23 nt, synthetic construct
  source 1..23: mol_type = other RNA
  modified_base 1: mod_base = OTHER; note = 5' vinyl phosphonate 2'O-methyl uridine phosphorothioate
  modified_base 2: mod_base = OTHER; note = 2'-fluoro uridine phosphorothioate
  modified_base 3: mod_base = OTHER; note = 2'O-methyl uridine
  modified_base 4: mod_base = OTHER; note = 2'O-methyl uridine
  modified_base 5: mod_base = OTHER; note = 2'O-methyl guanosine
  modified_base 6: mod_base = OTHER; note = 2'-fluoro uridine
  modified_base 7: mod_base = OTHER; note = 2'O-methyl guanosine
  modified_base 8: mod_base = OTHER; note = 2'O-methyl adenosine
  modified_base 9: mod_base = OTHER; note = 2'O-methyl uridine
  modified_base 10: mod_base = OTHER; note = 2'O-methyl cytidine
  modified_base 11: mod_base = OTHER; note = 2'O-methyl cytidine
  modified_base 12: mod_base = OTHER; note = 2'O-methyl adenosine
  modified_base 13: mod_base = OTHER; note = 2'O-methyl adenosine
  modified_base 14: mod_base = OTHER; note = 2'-fluoro adenosine
  modified_base 15: mod_base = OTHER; note = 2'O-methyl adenosine
  modified_base 16: mod_base = OTHER; note = 2'-fluoro adenosine
  modified_base 17: mod_base = OTHER; note = 2'O-methyl uridine
  modified_base 18: mod_base = OTHER; note = 2'O-methyl guanosine
  modified_base 19: mod_base = OTHER; note = 2'O-methyl uridine
  modified_base 20: mod_base = OTHER; note = 2'O-methyl cytidine
  modified_base 21: mod_base = OTHER; note = 2'O-methyl cytidine phosphorothioate
  modified_base 22: mod_base = OTHER; note = 2'O-methyl uridine phosphorothioate
  modified_base 23: mod_base = OTHER; note = 2'O-methyl uridine
ttttgtgatccaaaaatgtcctt

SEQ ID NO: 481 - RNA, 23 nt, synthetic construct
  source 1..23: mol_type = other RNA
  modified_base 1: mod_base = OTHER; note = 5' vinyl phosphonate 2'O-methyl adenosine phosphorothioate
  modified_base 2: mod_base = OTHER; note = 2'-fluoro guanosine phosphorothioate
  modified_base 3: mod_base = OTHER; note = 2'O-methyl uridine
  modified_base 4: mod_base = OTHER; note = 2'O-methyl guanosine
  modified_base 5: mod_base = OTHER; note = 2'O-methyl cytidine
  modified_base 6: mod_base = OTHER; note = 2'-fluoro uridine
  modified_base 7: mod_base = OTHER; note = 2'O-methyl uridine
  modified_base 8: mod_base = OTHER; note = 2'O-methyl uridine
  modified_base 9: mod_base = OTHER; note = 2'O-methyl uridine
  modified_base 10: mod_base = OTHER; note = 2'O-methyl guanosine
  modified_base 11: mod_base = OTHER; note = 2'O-methyl uridine
  modified_base 12: mod_base = OTHER; note = 2'O-methyl guanosine
  modified_base 13: mod_base = OTHER; note = 2'O-methyl adenosine
  modified_base 14: mod_base = OTHER; note = 2'-fluoro uridine
  modified_base 15: mod_base = OTHER; note = 2'O-methyl cytidine
  modified_base 16: mod_base = OTHER; note = 2'-fluoro cytidine
  modified_base 17: mod_base = OTHER; note = 2'O-methyl adenosine
  modified_base 18: mod_base = OTHER; note = 2'O-methyl adenosine
  modified_base 19: mod_base = OTHER; note = 2'O-methyl adenosine
  modified_base 20: mod_base = OTHER; note = 2'O-methyl adenosine
  modified_base 21: mod_base = OTHER; note = 2'O-methyl adenosine phosphorothioate
  modified_base 22: mod_base = OTHER; note = 2'O-methyl uridine phosphorothioate
  modified_base 23: mod_base = OTHER; note = 2'O-methyl uridine
agtgcttttgtgatccaaaaatt

SEQ ID NO: 482 - RNA, 23 nt, synthetic construct
  source 1..23: mol_type = other RNA
  modified_base 1: mod_base = OTHER; note = 5' vinyl phosphonate 2'O-methyl adenosine phosphorothioate
  modified_base 2: mod_base = OTHER; note = 2'-fluoro guanosine phosphorothioate
  modified_base 3: mod_base = OTHER; note = 2'O-methyl adenosine
  modified_base 4: mod_base = OTHER; note = 2'O-methyl adenosine
  modified_base 5: mod_base = OTHER; note = 2'O-methyl guanosine
  modified_base 6: mod_base = OTHER; note = 2'-fluoro uridine
  modified_base 7: mod_base = OTHER; note = 2'O-methyl guanosine
  modified_base 8: mod_base = OTHER; note = 2'O-methyl cytidine
  modified_base 9: mod_base = OTHER; note = 2'O-methyl uridine
  modified_base 10: mod_base = OTHER; note = 2'O-methyl uridine
  modified_base 11: mod_base = OTHER; note = 2'O-methyl uridine
  modified_base 12: mod_base = OTHER; note = 2'O-methyl uridine
  modified_base 13: mod_base = OTHER; note = 2'O-methyl guanosine
  modified_base 14: mod_base = OTHER; note = 2'-fluoro uridine
  modified_base 15: mod_base = OTHER; note = 2'O-methyl guanosine
  modified_base 16: mod_base = OTHER; note = 2'-fluoro adenosine
  modified_base 17: mod_base = OTHER; note = 2'O-methyl uridine
  modified_base 18: mod_base = OTHER; note = 2'O-methyl cytidine
  modified_base 19: mod_base = OTHER; note = 2'O-methyl cytidine
  modified_base 20: mod_base = OTHER; note = 2'O-methyl adenosine
  modified_base 21: mod_base = OTHER; note = 2'O-methyl adenosine phosphorothioate
  modified_base 22: mod_base = OTHER; note = 2'O-methyl uridine phosphorothioate
  modified_base 23: mod_base = OTHER; note = 2'O-methyl uridine
agaagtgcttttgtgatccaatt

SEQ ID NO: 483 - RNA, 23 nt, synthetic construct
  source 1..23: mol_type = other RNA
  modified_base 1: mod_base = OTHER; note = 5' vinyl phosphonate 2'O-methyl uridine phosphorothioate
  modified_base 2: mod_base = OTHER; note = 2'-fluoro guanosine phosphorothioate
  modified_base 3: mod_base = OTHER; note = 2'O-methyl guanosine
  modified_base 4: mod_base = OTHER; note = 2'O-methyl adenosine
  modified_base 5: mod_base = OTHER; note = 2'O-methyl adenosine
  modified_base 6: mod_base = OTHER; note = 2'-fluoro guanosine
  modified_base 7: mod_base = OTHER; note = 2'O-methyl adenosine
  modified_base 8: mod_base = OTHER; note = 2'O-methyl adenosine
  modified_base 9: mod_base = OTHER; note = 2'O-methyl guanosine
  modified_base 10: mod_base = OTHER; note = 2'O-methyl uridine
  modified_base 11: mod_base = OTHER; note = 2'O-methyl guanosine
  modified_base 12: mod_base = OTHER; note = 2'O-methyl cytidine
  modified_base 13: mod_base = OTHER; note = 2'O-methyl uridine
  modified_base 14: mod_base = OTHER; note = 2'-fluoro uridine
  modified_base 15: mod_base = OTHER; note = 2'O-methyl uridine
  modified_base 16: mod_base = OTHER; note = 2'-fluoro uridine
  modified_base 17: mod_base = OTHER; note = 2'O-methyl guanosine
  modified_base 18: mod_base = OTHER; note = 2'O-methyl uridine
  modified_base 19: mod_base = OTHER; note = 2'O-methyl guanosine
  modified_base 20: mod_base = OTHER; note = 2'O-methyl adenosine
  modified_base 21: mod_base = OTHER; note = 2'O-methyl uridine phosphorothioate
  modified_base 22: mod_base = OTHER; note = 2'O-methyl uridine phosphorothioate
  modified_base 23: mod_base = OTHER; note = 2'O-methyl uridine
tggaagaagtgcttttgtgattt

SEQ ID NO: 484 - RNA, 23 nt, synthetic construct
  source 1..23: mol_type = other RNA
  modified_base 1: mod_base = OTHER; note = 5' vinyl phosphonate 2'O-methyl adenosine phosphorothioate
  modified_base 2: mod_base = OTHER; note = 2'-fluoro uridine phosphorothioate
  modified_base 3: mod_base = OTHER; note = 2'O-methyl guanosine
  modified_base 4: mod_base = OTHER; note = 2'O-methyl guanosine
  modified_base 5: mod_base = OTHER; note = 2'O-methyl adenosine
  modified_base 6: mod_base = OTHER; note = 2'-fluoro adenosine
  modified_base 7: mod_base = OTHER; note = 2'O-methyl guanosine
  modified_base 8: mod_base = OTHER; note = 2'O-methyl adenosine
  modified_base 9: mod_base = OTHER; note = 2'O-methyl adenosine
  modified_base 10: mod_base = OTHER; note = 2'O-methyl guanosine
  modified_base 11: mod_base = OTHER; note = 2'O-methyl uridine
  modified_base 12: mod_base = OTHER; note = 2'O-methyl guanosine
  modified_base 13: mod_base = OTHER; note = 2'O-methyl cytidine
  modified_base 14: mod_base = OTHER; note = 2'-fluoro uridine
  modified_base 15: mod_base = OTHER; note = 2'O-methyl uridine
  modified_base 16: mod_base = OTHER; note = 2'-fluoro uridine
  modified_base 17: mod_base = OTHER; note = 2'O-methyl uridine
  modified_base 18: mod_base = OTHER; note = 2'O-methyl guanosine
  modified_base 19: mod_base = OTHER; note = 2'O-methyl uridine
  modified_base 20: mod_base = OTHER; note = 2'O-methyl guanosine
  modified_base 21: mod_base = OTHER; note = 2'O-methyl adenosine phosphorothioate
  modified_base 22: mod_base = OTHER; note = 2'O-methyl uridine phosphorothioate
  modified_base 23: mod_base = OTHER; note = 2'O-methyl uridine
atggaagaagtgcttttgtgatt

SEQ ID NO: 485 - RNA, 23 nt, synthetic construct
  source 1..23: mol_type = other RNA
  modified_base 1: mod_base = OTHER; note = 5' vinyl phosphonate 2'O-methyl uridine phosphorothioate
  modified_base 2: mod_base = OTHER; note = 2'-fluoro cytidine phosphorothioate
  modified_base 3: mod_base = OTHER; note = 2'O-methyl adenosine
  modified_base 4: mod_base = OTHER; note = 2'O-methyl uridine
  modified_base 5: mod_base = OTHER; note = 2'O-methyl cytidine
  modified_base 6: mod_base = OTHER; note = 2'-fluoro guanosine
  modified_base 7: mod_base = OTHER; note = 2'O-methyl adenosine
  modified_base 8: mod_base = OTHER; note = 2'O-methyl uridine
  modified_base 9: mod_base = OTHER; note = 2'O-methyl guanosine
  modified_base 10: mod_base = OTHER; note = 2'O-methyl guanosine
  modified_base 11: mod_base = OTHER; note = 2'O-methyl adenosine
  modified_base 12: mod_base = OTHER; note = 2'O-methyl adenosine
  modified_base 13: mod_base = OTHER; note = 2'O-methyl guanosine
  modified_base 14: mod_base = OTHER; note = 2'-fluoro adenosine
  modified_base 15: mod_base = OTHER; note = 2'O-methyl adenosine
  modified_base 16: mod_base = OTHER; note = 2'-fluoro guanosine
  modified_base 17: mod_base = OTHER; note = 2'O-methyl uridine
  modified_base 18: mod_base = OTHER; note = 2'O-methyl guanosine
  modified_base 19: mod_base = OTHER; note = 2'O-methyl cytidine
  modified_base 20: mod_base = OTHER; note = 2'O-methyl uridine
  modified_base 21: mod_base = OTHER; note = 2'O-methyl uridine phosphorothioate
  modified_base 22: mod_base = OTHER; note = 2'O-methyl uridine phosphorothioate
  modified_base 23: mod_base = OTHER; note = 2'O-methyl uridine
tcatcgatggaagaagtgctttt

SEQ ID NO: 486 - RNA, 23 nt, synthetic construct
  source 1..23: mol_type = other RNA
  modified_base 1: mod_base = OTHER; note = 5' vinyl phosphonate 2'O-methyl adenosine phosphorothioate
  modified_base 2: mod_base = OTHER; note = 2'-fluoro uridine phosphorothioate
  modified_base 3: mod_base = OTHER; note = 2'O-methyl cytidine
  modified_base 4: mod_base = OTHER; note = 2'O-methyl adenosine
  modified_base 5: mod_base = OTHER; note = 2'O-methyl uridine
  modified_base 6: mod_base = OTHER; note = 2'-fluoro cytidine
  modified_base 7: mod_base = OTHER; note = 2'O-methyl guanosine
  modified_base 8: mod_base = OTHER; note = 2'O-methyl adenosine
  modified_base 9: mod_base = OTHER; note = 2'O-methyl uridine
  modified_base 10: mod_base = OTHER; note = 2'O-methyl guanosine
  modified_base 11: mod_base = OTHER; note = 2'O-methyl guanosine
  modified_base 12: mod_base = OTHER; note = 2'O-methyl adenosine
  modified_base 13: mod_base = OTHER; note = 2'O-methyl adenosine
  modified_base 14: mod_base = OTHER; note = 2'-fluoro guanosine
  modified_base 15: mod_base = OTHER; note = 2'O-methyl adenosine
  modified_base 16: mod_base = OTHER; note = 2'-fluoro adenosine
  modified_base 17: mod_base = OTHER; note = 2'O-methyl guanosine
  modified_base 18: mod_base = OTHER; note = 2'O-methyl uridine
  modified_base 19: mod_base = OTHER; note = 2'O-methyl guanosine
  modified_base 20: mod_base = OTHER; note = 2'O-methyl cytidine
  modified_base 21: mod_base = OTHER; note = 2'O-methyl uridine phosphorothioate
  modified_base 22: mod_base = OTHER; note = 2'O-methyl uridine phosphorothioate
  modified_base 23: mod_base = OTHER; note = 2'O-methyl uridine
atcatcgatggaagaagtgcttt

SEQ ID NO: 487 - RNA, 23 nt, synthetic construct
  source 1..23: mol_type = other RNA
  modified_base 1: mod_base = OTHER; note = 5' vinyl phosphonate 2'O-methyl uridine phosphorothioate
  modified_base 2: mod_base = OTHER; note = 2'-fluoro uridine phosphorothioate
  modified_base 3: mod_base = OTHER; note = 2'O-methyl cytidine
  modified_base 4: mod_base = OTHER; note = 2'O-methyl uridine
  modified_base 5: mod_base = OTHER; note = 2'O-methyl cytidine
  modified_base 6: mod_base = OTHER; note = 2'-fluoro uridine
  modified_base 7: mod_base = OTHER; note = 2'O-methyl cytidine
  modified_base 8: mod_base = OTHER; note = 2'O-methyl cytidine
  modified_base 9: mod_base = OTHER; note = 2'O-methyl adenosine
  modified_base 10: mod_base = OTHER; note = 2'O-methyl uridine
  modified_base 11: mod_base = OTHER; note = 2'O-methyl cytidine
  modified_base 12: mod_base = OTHER; note = 2'O-methyl adenosine
  modified_base 13: mod_base = OTHER; note = 2'O-methyl uridine
  modified_base 14: mod_base = OTHER; note = 2'-fluoro cytidine
  modified_base 15: mod_base = OTHER; note = 2'O-methyl guanosine
  modified_base 16: mod_base = OTHER; note = 2'-fluoro adenosine
  modified_base 17: mod_base = OTHER; note = 2'O-methyl uridine
  modified_base 18: mod_base = OTHER; note = 2'O-methyl guanosine
  modified_base 19: mod_base = OTHER; note = 2'O-methyl guanosine
  modified_base 20: mod_base = OTHER; note = 2'O-methyl adenosine
  modified_base 21: mod_base = OTHER; note = 2'O-methyl adenosine phosphorothioate
  modified_base 22: mod_base = OTHER; note = 2'O-methyl uridine phosphorothioate
  modified_base 23: mod_base = OTHER; note = 2'O-methyl uridine
ttctctccatcatcgatggaatt

SEQ ID NO: 488 - RNA, 23 nt, synthetic construct
  source 1..23: mol_type = other RNA
  modified_base 1: mod_base = OTHER; note = 5' vinyl phosphonate 2'O-methyl adenosine phosphorothioate
  modified_base 2: mod_base = OTHER; note = 2'-fluoro cytidine phosphorothioate
  modified_base 3: mod_base = OTHER; note = 2'O-methyl uridine
  modified_base 4: mod_base = OTHER; note = 2'O-methyl guanosine
  modified_base 5: mod_base = OTHER; note = 2'O-methyl adenosine
  modified_base 6: mod_base = OTHER; note = 2'-fluoro adenosine
  modified_base 7: mod_base = OTHER; note = 2'O-methyl guanosine
  modified_base 8: mod_base = OTHER; note = 2'O-methyl cytidine
  modified_base 9: mod_base = OTHER; note = 2'O-methyl cytidine
  modified_base 10: mod_base = OTHER; note = 2'O-methyl adenosine
  modified_base 11: mod_base = OTHER; note = 2'O-methyl cytidine
  modified_base 12: mod_base = OTHER; note = 2'O-methyl uridine
  modified_base 13: mod_base = OTHER; note = 2'O-methyl guanosine
  modified_base 14: mod_base = OTHER; note = 2'-fluoro uridine
  modified_base 15: mod_base = OTHER; note = 2'O-methyl guanosine
  modified_base 16: mod_base = OTHER; note = 2'-fluoro adenosine
  modified_base 17: mod_base = OTHER; note = 2'O-methyl cytidine
  modified_base 18: mod_base = OTHER; note = 2'O-methyl guanosine
  modified_base 19: mod_base = OTHER; note = 2'O-methyl adenosine
  modified_base 20: mod_base = OTHER; note = 2'O-methyl uridine
  modified_base 21: mod_base = OTHER; note = 2'O-methyl guanosine phosphorothioate
  modified_base 22: mod_base = OTHER; note = 2'O-methyl uridine phosphorothioate
  modified_base 23: mod_base = OTHER; note = 2'O-methyl uridine
actgaagccactgtgacgatgtt

SEQ ID NO: 489 - RNA, 23 nt, synthetic construct
  source 1..23: mol_type = other RNA
  modified_base 1: mod_base = OTHER; note = 5' vinyl phosphonate 2'O-methyl adenosine phosphorothioate
  modified_base 2: mod_base = OTHER; note = 2'-fluoro cytidine phosphorothioate
  modified_base 3: mod_base = OTHER; note = 2'O-methyl adenosine
  modified_base 4: mod_base = OTHER; note = 2'O-methyl cytidine
  modified_base 5: mod_base = OTHER; note = 2'O-methyl uridine
  modified_base 6: mod_base = OTHER; note = 2'-fluoro guanosine
  modified_base 7: mod_base = OTHER; note = 2'O-methyl adenosine
  modified_base 8: mod_base = OTHER; note = 2'O-methyl adenosine
  modified_base 9: mod_base = OTHER; note = 2'O-methyl guanosine
  modified_base 10: mod_base = OTHER; note = 2'O-methyl cytidine
  modified_base 11: mod_base = OTHER; note = 2'O-methyl cytidine
  modified_base 12: mod_base = OTHER; note = 2'O-methyl adenosine
  modified_base 13: mod_base = OTHER; note = 2'O-methyl cytidine
  modified_base 14: mod_base = OTHER; note = 2'-fluoro uridine
  modified_base 15: mod_base = OTHER; note = 2'O-methyl guanosine
  modified_base 16: mod_base = OTHER; note = 2'-fluoro uridine
  modified_base 17: mod_base = OTHER; note = 2'O-methyl guanosine
  modified_base 18: mod_base = OTHER; note = 2'O-methyl adenosine
  modified_base 19: mod_base = OTHER; note = 2'O-methyl cytidine
  modified_base 20: mod_base = OTHER; note = 2'O-methyl guanosine
  modified_base 21: mod_base = OTHER; note = 2'O-methyl adenosine phosphorothioate
  modified_base 22: mod_base = OTHER; note = 2'O-methyl uridine phosphorothioate
  modified_base 23: mod_base = OTHER; note = 2'O-methyl uridine
acactgaagccactgtgacgatt

SEQ ID NO: 490 - RNA, 23 nt, synthetic construct
  source 1..23: mol_type = other RNA
  modified_base 1: mod_base = OTHER; note = 5' vinyl phosphonate 2'O-methyl uridine phosphorothioate
  modified_base 2: mod_base = OTHER; note = 2'-fluoro adenosine phosphorothioate
  modified_base 3: mod_base = OTHER; note = 2'O-methyl uridine
  modified_base 4: mod_base = OTHER; note = 2'O-methyl guanosine
  modified_base 5: mod_base = OTHER; note = 2'O-methyl guanosine
  modified_base 6: mod_base = OTHER; note = 2'-fluoro guanosine
  modified_base 7: mod_base = OTHER; note = 2'O-methyl adenosine
  modified_base 8: mod_base = OTHER; note = 2'O-methyl uridine
  modified_base 9: mod_base = OTHER; note = 2'O-methyl guanosine
  modified_base 10: mod_base = OTHER; note = 2'O-methyl adenosine
  modified_base 11: mod_base = OTHER; note = 2'O-methyl guanosine
  modified_base 12: mod_base = OTHER; note = 2'O-methyl guanosine
  modified_base 13: mod_base = OTHER; note = 2'O-methyl uridine
  modified_base 14: mod_base = OTHER; note = 2'-fluoro adenosine
  modified_base 15: mod_base = OTHER; note = 2'O-methyl adenosine
  modified_base 16: mod_base = OTHER; note = 2'-fluoro guanosine
  modified_base 17: mod_base = OTHER; note = 2'O-methyl guanosine
  modified_base 18: mod_base = OTHER; note = 2'O-methyl adenosine
  modified_base 19: mod_base = OTHER; note = 2'O-methyl adenosine
  modified_base 20: mod_base = OTHER; note = 2'O-methyl uridine
  modified_base 21: mod_base = OTHER; note = 2'O-methyl cytidine phosphorothioate
  modified_base 22: mod_base = OTHER; note = 2'O-methyl uridine phosphorothioate
  modified_base 23: mod_base = OTHER; note = 2'O-methyl uridine
tatgggatgaggtaaggaatctt

SEQ ID NO: 491 - RNA, 23 nt, synthetic construct
  source 1..23: mol_type = other RNA
  modified_base 1: mod_base = OTHER; note = 5' vinyl phosphonate 2'O-methyl adenosine phosphorothioate
  modified_base 2: mod_base = OTHER; note = 2'-fluoro uridine phosphorothioate
  modified_base 3: mod_base = OTHER; note = 2'O-methyl adenosine
  modified_base 4: mod_base = OTHER; note = 2'O-methyl uridine
  modified_base 5: mod_base = OTHER; note = 2'O-methyl guanosine
  modified_base 6: mod_base = OTHER; note = 2'-fluoro guanosine
  modified_base 7: mod_base = OTHER; note = 2'O-methyl guanosine
  modified_base 8: mod_base = OTHER; note = 2'O-methyl adenosine
  modified_base 9: mod_base = OTHER; note = 2'O-methyl uridine
  modified_base 10: mod_base = OTHER; note = 2'O-methyl guanosine
  modified_base 11: mod_base = OTHER; note = 2'O-methyl adenosine
  modified_base 12: mod_base = OTHER; note = 2'O-methyl guanosine
  modified_base 13: mod_base = OTHER; note = 2'O-methyl guanosine
  modified_base 14: mod_base = OTHER; note = 2'-fluoro uridine
  modified_base 15: mod_base = OTHER; note = 2'O-methyl adenosine
  modified_base 16: mod_base = OTHER; note = 2'-fluoro adenosine
  modified_base 17: mod_base = OTHER; note = 2'O-methyl guanosine
  modified_base 18: mod_base = OTHER; note = 2'O-methyl guanosine
  modified_base 19: mod_base = OTHER; note = 2'O-methyl adenosine
  modified_base 20: mod_base = OTHER; note = 2'O-methyl adenosine
  modified_base 21: mod_base = OTHER; note = 2'O-methyl uridine phosphorothioate
  modified_base 22: mod_base = OTHER; note = 2'O-methyl uridine phosphorothioate
  modified_base 23: mod_base = OTHER; note = 2'O-methyl uridine
atatgggatgaggtaaggaattt

SEQ ID NO: 492 - RNA, 23 nt, synthetic construct
  source 1..23: mol_type = other RNA
  modified_base 1: mod_base = OTHER; note = 5' vinyl phosphonate 2'O-methyl adenosine phosphorothioate
  modified_base 2: mod_base = OTHER; note = 2'-fluoro adenosine phosphorothioate
  modified_base 3: mod_base = OTHER; note = 2'O-methyl uridine
  modified_base 4: mod_base = OTHER; note = 2'O-methyl adenosine
  modified_base 5: mod_base = OTHER; note = 2'O-methyl uridine
  modified_base 6: mod_base = OTHER; note = 2'-fluoro guanosine
  modified_base 7: mod_base = OTHER; note = 2'O-methyl guanosine
  modified_base 8: mod_base = OTHER; note = 2'O-methyl guanosine
  modified_base 9: mod_base = OTHER; note = 2'O-methyl adenosine
  modified_base 10: mod_base = OTHER; note = 2'O-methyl uridine
  modified_base 11: mod_base = OTHER; note = 2'O-methyl guanosine
  modified_base 12: mod_base = OTHER; note = 2'O-methyl adenosine
  modified_base 13: mod_base = OTHER; note = 2'O-methyl guanosine
  modified_base 14: mod_base = OTHER; note = 2'-fluoro guanosine
  modified_base 15: mod_base = OTHER; note = 2'O-methyl uridine
  modified_base 16: mod_base = OTHER; note = 2'-fluoro adenosine
  modified_base 17: mod_base = OTHER; note = 2'O-methyl adenosine
  modified_base 18: mod_base = OTHER; note = 2'O-methyl guanosine
  modified_base 19: mod_base = OTHER; note = 2'O-methyl guanosine
  modified_base 20: mod_base = OTHER; note = 2'O-methyl adenosine
  modified_base 21: mod_base = OTHER; note = 2'O-methyl adenosine phosphorothioate
  modified_base 22: mod_base = OTHER; note = 2'O-methyl uridine phosphorothioate
  modified_base 23: mod_base = OTHER; note = 2'O-methyl uridine
aatatgggatgaggtaaggaatt

SEQ ID NO: 493 - RNA, 23 nt, synthetic construct
  source 1..23: mol_type = other RNA
  modified_base 1: mod_base = OTHER; note = 5' vinyl phosphonate 2'O-methyl uridine phosphorothioate
  modified_base 2: mod_base = OTHER; note = 2'-fluoro uridine phosphorothioate
  modified_base 3: mod_base = OTHER; note = 2'O-methyl uridine
  modified_base 4: mod_base = OTHER; note = 2'O-methyl guanosine
  modified_base 5: mod_base = OTHER; note = 2'O-methyl cytidine
  modified_base 6: mod_base = OTHER; note = 2'-fluoro uridine
  modified_base 7: mod_base = OTHER; note = 2'O-methyl guanosine
  modified_base 8: mod_base = OTHER; note = 2'O-methyl guanosine
  modified_base 9: mod_base = OTHER; note = 2'O-methyl adenosine
  modified_base 10: mod_base = OTHER; note = 2'O-methyl adenosine
  modified_base 11: mod_base = OTHER; note = 2'O-methyl cytidine
  modified_base 12: mod_base = OTHER; note = 2'O-methyl adenosine
  modified_base 13: mod_base = OTHER; note = 2'O-methyl adenosine
  modified_base 14: mod_base = OTHER; note = 2'-fluoro uridine
  modified_base 15: mod_base = OTHER; note = 2'O-methyl adenosine
  modified_base 16: mod_base = OTHER; note = 2'-fluoro uridine
  modified_base 17: mod_base = OTHER; note = 2'O-methyl guanosine
  modified_base 18: mod_base = OTHER; note = 2'O-methyl guanosine
  modified_base 19: mod_base = OTHER; note = 2'O-methyl guanosine
  modified_base 20: mod_base = OTHER; note = 2'O-methyl adenosine
  modified_base 21: mod_base = OTHER; note = 2'O-methyl uridine phosphorothioate
  modified_base 22: mod_base = OTHER; note = 2'O-methyl uridine phosphorothioate
  modified_base 23: mod_base = OTHER; note = 2'O-methyl uridine
tttgctggaacaatatgggattt

SEQ ID NO: 494 - RNA, 23 nt, synthetic construct
  source 1..23: mol_type = other RNA
  modified_base 1: mod_base = OTHER; note = 5' vinyl phosphonate 2'O-methyl adenosine phosphorothioate
  modified_base 2: mod_base = OTHER; note = 2'-fluoro uridine phosphorothioate
  modified_base 3: mod_base = OTHER; note = 2'O-methyl uridine
  modified_base 4: mod_base = OTHER; note = 2'O-methyl uridine
  modified_base 5: mod_base = OTHER; note = 2'O-methyl guanosine
  modified_base 6: mod_base = OTHER; note = 2'-fluoro cytidine
  modified_base 7: mod_base = OTHER; note = 2'O-methyl uridine
  modified_base 8: mod_base = OTHER; note = 2'O-methyl guanosine
  modified_base 9: mod_base = OTHER; note = 2'O-methyl guanosine
  modified_base 10: mod_base = OTHER; note = 2'O-methyl adenosine
  modified_base 11: mod_base = OTHER; note = 2'O-methyl adenosine
  modified_base 12: mod_base = OTHER; note = 2'O-methyl cytidine
  modified_base 13: mod_base = OTHER; note = 2'O-methyl adenosine
  modified_base 14: mod_base = OTHER; note = 2'-fluoro adenosine
  modified_base 15: mod_base = OTHER; note = 2'O-methyl uridine
  modified_base 16: mod_base = OTHER; note = 2'-fluoro adenosine
  modified_base 17: mod_base = OTHER; note = 2'O-methyl uridine
  modified_base 18: mod_base = OTHER; note = 2'O-methyl guanosine
  modified_base 19: mod_base = OTHER; note = 2'O-methyl guanosine
  modified_base 20: mod_base = OTHER; note = 2'O-methyl guanosine
  modified_base 21: mod_base = OTHER; note = 2'O-methyl adenosine phosphorothioate
  modified_base 22: mod_base = OTHER; note = 2'O-methyl uridine phosphorothioate
  modified_base 23: mod_base = OTHER; note = 2'O-methyl uridine
atttgctggaacaatatgggatt

SEQ ID NO: 495 - RNA, 23 nt, synthetic construct
  source 1..23: mol_type = other RNA
  modified_base 1: mod_base = OTHER; note = 5' vinyl phosphonate 2'O-methyl uridine phosphorothioate
  modified_base 2: mod_base = OTHER; note = 2'-fluoro uridine phosphorothioate
  modified_base 3: mod_base = OTHER; note = 2'O-methyl uridine
  modified_base 4: mod_base = OTHER; note = 2'O-methyl guanosine
  modified_base 5: mod_base = OTHER; note = 2'O-methyl adenosine
  modified_base 6: mod_base = OTHER; note = 2'-fluoro uridine
  modified_base 7: mod_base = OTHER; note = 2'O-methyl adenosine
  modified_base 8: mod_base = OTHER; note = 2'O-methyl cytidine
  modified_base 9: mod_base = OTHER; note = 2'O-methyl cytidine
  modified_base 10: mod_base = OTHER; note = 2'O-methyl adenosine
  modified_base 11: mod_base = OTHER; note = 2'O-methyl guanosine
  modified_base 12: mod_base = OTHER; note = 2'O-methyl uridine
  modified_base 13: mod_base = OTHER; note = 2'O-methyl uridine
  modified_base 14: mod_base = OTHER; note = 2'-fluoro uridine
  modified_base 15: mod_base = OTHER; note = 2'O-methyl uridine
  modified_base 16: mod_base = OTHER; note = 2'-fluoro uridine
  modified_base 17: mod_base = OTHER; note = 2'O-methyl cytidine
  modified_base 18: mod_base = OTHER; note = 2'O-methyl cytidine
  modified_base 19: mod_base = OTHER; note = 2'O-methyl cytidine
  modified_base 20: mod_base = OTHER; note = 2'O-methyl adenosine
  modified_base 21: mod_base = OTHER; note = 2'O-methyl adenosine phosphorothioate
  modified_base 22: mod_base = OTHER; note = 2'O-methyl uridine phosphorothioate
  modified_base 23: mod_base = OTHER; note = 2'O-methyl uridine
tttgataccagtttttcccaatt

SEQ ID NO: 496 - RNA, 23 nt, synthetic construct
  source 1..23: mol_type = other RNA
  modified_base 1: mod_base = OTHER; note = 5' vinyl phosphonate 2'O-methyl uridine phosphorothioate
  modified_base 2: mod_base = OTHER; note = 2'-fluoro guanosine phosphorothioate
  modified_base 3: mod_base = OTHER; note = 2'O-methyl adenosine
  modified_base 4: mod_base = OTHER; note = 2'O-methyl guanosine
  modified_base 5: mod_base = OTHER; note = 2'O-methyl guanosine
  modified_base 6: mod_base = OTHER; note = 2'-fluoro uridine
  modified_base 7: mod_base = OTHER; note = 2'O-methyl uridine
  modified_base 8: mod_base = OTHER; note = 2'O-methyl uridine
  modified_base 9: mod_base = OTHER; note = 2'O-methyl uridine
  modified_base 10: mod_base = OTHER; note = 2'O-methyl guanosine
  modified_base 11: mod_base = OTHER; note = 2'O-methyl adenosine
  modified_base 12: mod_base = OTHER; note = 2'O-methyl uridine
  modified_base 13: mod_base = OTHER; note = 2'O-methyl adenosine
  modified_base 14: mod_base = OTHER; note = 2'-fluoro cytidine
  modified_base 15: mod_base = OTHER; note = 2'O-methyl cytidine
  modified_base 16: mod_base = OTHER; note = 2'-fluoro adenosine
  modified_base 17: mod_base = OTHER; note = 2'O-methyl guanosine
  modified_base 18: mod_base = OTHER; note = 2'O-methyl uridine
  modified_base 19: mod_base = OTHER; note = 2'O-methyl uridine
  modified_base 20: mod_base = OTHER; note = 2'O-methyl uridine
  modified_base 21: mod_base = OTHER; note = 2'O-methyl uridine phosphorothioate
  modified_base 22: mod_base = OTHER; note = 2'O-methyl uridine phosphorothioate
  modified_base 23: mod_base = OTHER; note = 2'O-methyl uridine
tgaggttttgataccagtttttt

SEQ ID NO: 497 - RNA, 23 nt, synthetic construct
  source 1..23: mol_type = other RNA
  modified_base 1: mod_base = OTHER; note = 5' vinyl phosphonate 2'O-methyl adenosine phosphorothioate
  modified_base 2: mod_base = OTHER; note = 2'-fluoro uridine phosphorothioate
  modified_base 3: mod_base = OTHER; note = 2'O-methyl uridine
  modified_base 4: mod_base = OTHER; note = 2'O-methyl uridine
  modified_base 5: mod_base = OTHER; note = 2'O-methyl uridine
  modified_base 6: mod_base = OTHER; note = 2'-fluoro uridine
  modified_base 7: mod_base = OTHER; note = 2'O-methyl guanosine
  modified_base 8: mod_base = OTHER; note = 2'O-methyl guanosine
  modified_base 9: mod_base = OTHER; note = 2'O-methyl uridine
  modified_base 10: mod_base = OTHER; note = 2'O-methyl guanosine
  modified_base 11: mod_base = OTHER; note = 2'O-methyl adenosine
  modified_base 12: mod_base = OTHER; note = 2'O-methyl adenosine
  modified_base 13: mod_base = OTHER; note = 2'O-methyl cytidine
  modified_base 14: mod_base = OTHER; note = 2'-fluoro cytidine
  modified_base 15: mod_base = OTHER; note = 2'O-methyl cytidine
  modified_base 16: mod_base = OTHER; note = 2'-fluoro adenosine
  modified_base 17: mod_base = OTHER; note = 2'O-methyl guanosine
  modified_base 18: mod_base = OTHER; note = 2'O-methyl uridine
  modified_base 19: mod_base = OTHER; note = 2'O-methyl adenosine
  modified_base 20: mod_base = OTHER; note = 2'O-methyl uridine
  modified_base 21: mod_base = OTHER; note = 2'O-methyl uridine phosphorothioate
  modified_base 22: mod_base = OTHER; note = 2'O-methyl uridine phosphorothioate
  modified_base 23: mod_base = OTHER; note = 2'O-methyl uridine
atttttggtgaacccagtatttt

SEQ ID NO: 498 - RNA, 23 nt, synthetic construct
  source 1..23: mol_type = other RNA
  modified_base 1: mod_base = OTHER; note = 5' vinyl phosphonate 2'O-methyl uridine phosphorothioate
  modified_base 2: mod_base = OTHER; note = 2'-fluoro uridine phosphorothioate
  modified_base 3: mod_base = OTHER; note = 2'O-methyl guanosine
  modified_base 4: mod_base = OTHER; note = 2'O-methyl guanosine
  modified_base 5: mod_base = OTHER; note = 2'O-methyl adenosine
  modified_base 6: mod_base = OTHER; note = 2'-fluoro uridine
  modified_base 7: mod_base = OTHER; note = 2'O-methyl uridine
  modified_base 8: mod_base = OTHER; note = 2'O-methyl uridine
  modified_base 9: mod_base = OTHER; note = 2'O-methyl uridine
  modified_base 10: mod_base = OTHER; note = 2'O-methyl uridine
  modified_base 11: mod_base = OTHER; note = 2'O-methyl guanosine
  modified_base 12: mod_base = OTHER; note = 2'O-methyl guanosine
  modified_base 13: mod_base = OTHER; note = 2'O-methyl uridine
  modified_base 14: mod_base = OTHER; note = 2'-fluoro guanosine
  modified_base 15: mod_base = OTHER; note = 2'O-methyl adenosine
  modified_base 16: mod_base = OTHER; note = 2'-fluoro adenosine
  modified_base 17: mod_base = OTHER; note = 2'O-methyl cytidine
  modified_base 18: mod_base = OTHER; note = 2'O-methyl cytidine
  modified_base 19: mod_base = OTHER; note = 2'O-methyl cytidine
  modified_base 20: mod_base = OTHER; note = 2'O-methyl adenosine
  modified_base 21: mod_base = OTHER; note = 2'O-methyl guanosine phosphorothioate
  modified_base 22: mod_base = OTHER; note = 2'O-methyl uridine phosphorothioate
  modified_base 23: mod_base = OTHER; note = 2'O-methyl uridine
ttggatttttggtgaacccagtt

SEQ ID NO: 499 - RNA, 23 nt, synthetic construct
  source 1..23: mol_type = other RNA
  modified_base 1: mod_base = OTHER; note = 5' vinyl phosphonate 2'O-methyl uridine phosphorothioate
  modified_base 2: mod_base = OTHER; note = 2'-fluoro cytidine phosphorothioate
  modified_base 3: mod_base = OTHER; note = 2'O-methyl uridine
  modified_base 4: mod_base = OTHER; note = 2'O-methyl uridine
  modified_base 5: mod_base = OTHER; note = 2'O-methyl guanosine
  modified_base 6: mod_base = OTHER; note = 2'-fluoro uridine
  modified_base 7: mod_base = OTHER; note = 2'O-methyl guanosine
  modified_base 8: mod_base = OTHER; note = 2'O-methyl cytidine
  modified_base 9: mod_base = OTHER; note = 2'O-methyl uridine
  modified_base 10: mod_base = OTHER; note = 2'O-methyl uridine
  modified_base 11: mod_base = OTHER; note = 2'O-methyl guanosine
  modified_base 12: mod_base = OTHER; note = 2'O-methyl guanosine
  modified_base 13: mod_base = OTHER; note = 2'O-methyl adenosine
  modified_base 14: mod_base = OTHER; note = 2'-fluoro uridine
  modified_base 15: mod_base = OTHER; note = 2'O-methyl uridine
  modified_base 16: mod_base = OTHER; note = 2'-fluoro uridine
  modified_base 17: mod_base = OTHER; note = 2'O-methyl uridine
  modified_base 18: mod_base = OTHER; note = 2'O-methyl uridine
  modified_base 19: mod_base = OTHER; note = 2'O-methyl guanosine
  modified_base 20: mod_base = OTHER; note = 2'O-methyl guanosine
  modified_base 21: mod_base = OTHER; note = 2'O-methyl uridine phosphorothioate
  modified_base 22: mod_base = OTHER; note = 2'O-methyl uridine phosphorothioate
  modified_base 23: mod_base = OTHER; note = 2'O-methyl uridine
tcttgtgcttggatttttggttt

SEQ ID NO: 500 - RNA, 23 nt, synthetic construct
  source 1..23: mol_type = other RNA
  modified_base 1: mod_base = OTHER; note = 5' vinyl phosphonate 2'O-methyl uridine phosphorothioate
  modified_base 2: mod_base = OTHER; note = 2'-fluoro cytidine phosphorothioate
  modified_base 3: mod_base = OTHER; note = 2'O-methyl adenosine
  modified_base 4: mod_base = OTHER; note = 2'O-methyl uridine
  modified_base 5: mod_base = OTHER; note = 2'O-methyl cytidine
  modified_base 6: mod_base = OTHER; note = 2'-fluoro uridine
  modified_base 7: mod_base = OTHER; note = 2'O-methyl guanosine
  modified_base 8: mod_base = OTHER; note = 2'O-methyl uridine
  modified_base 9: mod_base = OTHER; note = 2'O-methyl cytidine
  modified_base 10: mod_base = OTHER; note = 2'O-methyl uridine
  modified_base 11: mod_base = OTHER; note = 2'O-methyl cytidine
  modified_base 12: mod_base = OTHER; note = 2'O-methyl cytidine
  modified_base 13: mod_base = OTHER; note = 2'O-methyl adenosine
  modified_base 14: mod_base = OTHER; note = 2'-fluoro adenosine
  modified_base 15: mod_base = OTHER; note = 2'O-methyl uridine
  modified_base 16: mod_base = OTHER; note = 2'-fluoro adenosine
  modified_base 17: mod_base = OTHER; note = 2'O-methyl cytidine
  modified_base 18: mod_base = OTHER; note = 2'O-methyl adenosine
  modified_base 19: mod_base = OTHER; note = 2'O-methyl guanosine
  modified_base 20: mod_base = OTHER; note = 2'O-methyl guanosine
  modified_base 21: mod_base = OTHER; note = 2'O-methyl cytidine phosphorothioate
  modified_base 22: mod_base = OTHER; note = 2'O-methyl uridine phosphorothioate
  modified_base 23: mod_base = OTHER; note = 2'O-methyl uridine
tcatctgtctccaatacaggctt

SEQ ID NO: 501 - RNA, 23 nt, synthetic construct
  source 1..23: mol_type = other RNA
  modified_base 1: mod_base = OTHER; note = 5' vinyl phosphonate 2'O-methyl adenosine phosphorothioate
  modified_base 2: mod_base = OTHER; note = 2'-fluoro uridine phosphorothioate
  modified_base 3: mod_base = OTHER; note = 2'O-methyl cytidine
  modified_base 4: mod_base = OTHER; note = 2'O-methyl adenosine
  modified_base 5: mod_base = OTHER; note = 2'O-methyl guanosine
  modified_base 6: mod_base = OTHER; note = 2'-fluoro adenosine
  modified_base 7: mod_base = OTHER; note = 2'O-methyl cytidine
  modified_base 8: mod_base = OTHER; note = 2'O-methyl uridine
  modified_base 9: mod_base = OTHER; note = 2'O-methyl uridine
  modified_base 10: mod_base = OTHER; note = 2'O-methyl cytidine
  modified_base 11: mod_base = OTHER; note = 2'O-methyl uridine
  modified_base 12: mod_base = OTHER; note = 2'O-methyl uridine
  modified_base 13: mod_base = OTHER; note = 2'O-methyl adenosine
  modified_base 14: mod_base = OTHER; note = 2'-fluoro cytidine
  modified_base 15: mod_base = OTHER; note = 2'O-methyl guanosine
  modified_base 16: mod_base = OTHER; note = 2'-fluoro adenosine
  modified_base 17: mod_base = OTHER; note = 2'O-methyl cytidine
  modified_base 18: mod_base = OTHER; note = 2'O-methyl uridine
  modified_base 19: mod_base = OTHER; note = 2'O-methyl uridine
  modified_base 20: mod_base = OTHER; note = 2'O-methyl cytidine
  modified_base 21: mod_base = OTHER; note = 2'O-methyl adenosine phosphorothioate
  modified_base 22: mod_base = OTHER; note = 2'O-methyl uridine phosphorothioate
  modified_base 23: mod_base = OTHER; note = 2'O-methyl uridine
atcagacttcttacgacttcatt

SEQ ID NO: 502 - RNA, 23 nt, synthetic construct
  source 1..23: mol_type = other RNA
  modified_base 1: mod_base = OTHER; note = 5' vinyl phosphonate 2'O-methyl uridine phosphorothioate
  modified_base 2: mod_base = OTHER; note = 2'-fluoro uridine phosphorothioate
  modified_base 3: mod_base = OTHER; note = 2'O-methyl cytidine
  modified_base 4: mod_base = OTHER; note = 2'O-methyl cytidine
  modified_base 5: mod_base = OTHER; note = 2'O-methyl adenosine
  modified_base 6: mod_base = OTHER; note = 2'-fluoro uridine
  modified_base 7: mod_base = OTHER; note = 2'O-methyl cytidine
  modified_base 8: mod_base = OTHER; note = 2'O-methyl uridine
  modified_base 9: mod_base = OTHER; note = 2'O-methyl adenosine
  modified_base 10: mod_base = OTHER; note = 2'O-methyl uridine
  modified_base 11: mod_base = OTHER; note = 2'O-methyl cytidine
  modified_base 12: mod_base = OTHER; note = 2'O-methyl adenosine
  modified_base 13: mod_base = OTHER; note = 2'O-methyl guanosine
  modified_base 14: mod_base = OTHER; note = 2'-fluoro adenosine
  modified_base 15: mod_base = OTHER; note = 2'O-methyl cytidine
  modified_base 16: mod_base = OTHER; note = 2'-fluoro uridine
  modified_base 17: mod_base = OTHER; note = 2'O-methyl uridine
  modified_base 18: mod_base = OTHER; note = 2'O-methyl cytidine
  modified_base 19: mod_base = OTHER; note = 2'O-methyl uridine
  modified_base 20: mod_base = OTHER; note = 2'O-methyl uridine
  modified_base 21: mod_base = OTHER; note = 2'O-methyl adenosine phosphorothioate
  modified_base 22: mod_base = OTHER; note = 2'O-methyl uridine phosphorothioate
  modified_base 23: mod_base = OTHER; note = 2'O-methyl uridine
ttccatctatcagacttcttatt

SEQ ID NO: 503 - RNA, 23 nt, synthetic construct
  source 1..23: mol_type = other RNA
  modified_base 1: mod_base = OTHER; note = 5' vinyl phosphonate 2'O-methyl adenosine phosphorothioate
  modified_base 2: mod_base = OTHER; note = 2'-fluoro uridine phosphorothioate
  modified_base 3: mod_base = OTHER; note = 2'O-methyl uridine
  modified_base 4: mod_base = OTHER; note = 2'O-methyl cytidine
  modified_base 5: mod_base = OTHER; note = 2'O-methyl cytidine
  modified_base 6: mod_base = OTHER; note = 2'-fluoro adenosine
  modified_base 7: mod_base = OTHER; note = 2'O-methyl uridine
  modified_base 8: mod_base = OTHER; note = 2'O-methyl cytidine
  modified_base 9: mod_base = OTHER; note = 2'O-methyl uridine
  modified_base 10: mod_base = OTHER; note = 2'O-methyl adenosine
  modified_base 11: mod_base = OTHER; note = 2'O-methyl uridine
  modified_base 12: mod_base = OTHER; note = 2'O-methyl cytidine
  modified_base 13: mod_base = OTHER; note = 2'O-methyl adenosine
  modified_base 14: mod_base = OTHER; note = 2'-fluoro guanosine
  modified_base 15: mod_base = OTHER; note = 2'O-methyl adenosine
  modified_base 16: mod_base = OTHER; note = 2'-fluoro cytidine
  modified_base 17: mod_base = OTHER; note = 2'O-methyl uridine
  modified_base 18: mod_base = OTHER; note = 2'O-methyl uridine
  modified_base 19: mod_base = OTHER; note = 2'O-methyl cytidine
  modified_base 20: mod_base = OTHER; note = 2'O-methyl uridine
  modified_base 21: mod_base = OTHER; note = 2'O-methyl uridine phosphorothioate
  modified_base 22: mod_base = OTHER; note = 2'O-methyl uridine phosphorothioate
  modified_base 23: mod_base = OTHER; note = 2'O-methyl uridine
attccatctatcagacttctttt

SEQ ID NO: 504 - RNA, 23 nt, synthetic construct
  source 1..23: mol_type = other RNA
  modified_base 1: mod_base = OTHER; note = 5' vinyl phosphonate 2'O-methyl uridine phosphorothioate
  modified_base 2: mod_base = OTHER; note = 2'-fluoro adenosine phosphorothioate
  modified_base 3: mod_base = OTHER; note = 2'O-methyl uridine
  modified_base 4: mod_base = OTHER; note = 2'O-methyl uridine
  modified_base 5: mod_base = OTHER; note = 2'O-methyl cytidine
  modified_base 6: mod_base = OTHER; note = 2'-fluoro cytidine
  modified_base 7: mod_base = OTHER; note = 2'O-methyl adenosine
  modified_base 8: mod_base = OTHER; note = 2'O-methyl uridine
  modified_base 9: mod_base = OTHER; note = 2'O-methyl cytidine
  modified_base 10: mod_base = OTHER; note = 2'O-methyl uridine
  modified_base 11: mod_base = OTHER; note = 2'O-methyl adenosine
  modified_base 12: mod_base = OTHER; note = 2'O-methyl uridine
  modified_base 13: mod_base = OTHER; note = 2'O-methyl cytidine
  modified_base 14: mod_base = OTHER; note = 2'-fluoro adenosine
  modified_base 15: mod_base = OTHER; note = 2'O-methyl guanosine
  modified_base 16: mod_base = OTHER; note = 2'-fluoro adenosine
  modified_base 17: mod_base = OTHER; note = 2'O-methyl cytidine
  modified_base 18: mod_base = OTHER; note = 2'O-methyl uridine
  modified_base 19: mod_base = OTHER; note = 2'O-methyl uridine
  modified_base 20: mod_base = OTHER; note = 2'O-methyl cytidine
  modified_base 21: mod_base = OTHER; note = 2'O-methyl uridine phosphorothioate
  modified_base 22: mod_base = OTHER; note = 2'O-methyl uridine phosphorothioate
  modified_base 23: mod_base = OTHER; note = 2'O-methyl uridine
tattccatctatcagacttcttt

SEQ ID NO: 505 - RNA, 23 nt, synthetic construct
  source 1..23: mol_type = other RNA
  modified_base 1: mod_base = OTHER; note = 5' vinyl phosphonate 2'O-methyl adenosine phosphorothioate
  modified_base 2: mod_base = OTHER; note = 2'-fluoro guanosine phosphorothioate
  modified_base 3: mod_base = OTHER; note = 2'O-methyl uridine
  modified_base 4: mod_base = OTHER; note = 2'O-methyl adenosine
  modified_base 5: mod_base = OTHER; note = 2'O-methyl uridine
  modified_base 6: mod_base = OTHER; note = 2'-fluoro uridine
  modified_base 7: mod_base = OTHER; note = 2'O-methyl cytidine
  modified_base 8: mod_base = OTHER; note = 2'O-methyl cytidine
  modified_base 9: mod_base = OTHER; note = 2'O-methyl adenosine
  modified_base 10: mod_base = OTHER; note = 2'O-methyl uridine
  modified_base 11: mod_base = OTHER; note = 2'O-methyl cytidine
  modified_base 12: mod_base = OTHER; note = 2'O-methyl uridine
  modified_base 13: mod_base = OTHER; note = 2'O-methyl adenosine
  modified_base 14: mod_base = OTHER; note = 2'-fluoro uridine
  modified_base 15: mod_base = OTHER; note = 2'O-methyl cytidine
  modified_base 16: mod_base = OTHER; note = 2'-fluoro adenosine
  modified_base 17: mod_base = OTHER; note = 2'O-methyl guanosine
  modified_base 18: mod_base = OTHER; note = 2'O-methyl adenosine
  modified_base 19: mod_base = OTHER; note = 2'O-methyl cytidine
  modified_base 20: mod_base = OTHER; note = 2'O-methyl uridine
  modified_base 21: mod_base = OTHER; note = 2'O-methyl uridine phosphorothioate
  modified_base 22: mod_base = OTHER; note = 2'O-methyl uridine phosphorothioate
  modified_base 23: mod_base = OTHER; note = 2'O-methyl uridine
agtattccatctatcagactttt

SEQ ID NO: 506 - RNA, 23 nt, synthetic construct
  source 1..23: mol_type = other RNA
  modified_base 1: mod_base = OTHER; note = 5' vinyl phosphonate 2'O-methyl adenosine phosphorothioate
  modified_base 2: mod_base = OTHER; note = 2'-fluoro adenosine phosphorothioate
  modified_base 3: mod_base = OTHER; note = 2'O-methyl guanosine
  modified_base 4: mod_base = OTHER; note = 2'O-methyl uridine
  modified_base 5: mod_base = OTHER; note = 2'O-methyl adenosine
  modified_base 6: mod_base = OTHER; note = 2'-fluoro uridine
  modified_base 7: mod_base = OTHER; note = 2'O-methyl uridine
  modified_base 8: mod_base = OTHER; note = 2'O-methyl cytidine
  modified_base 9: mod_base = OTHER; note = 2'O-methyl cytidine
  modified_base 10: mod_base = OTHER; note = 2'O-methyl adenosine
  modified_base 11: mod_base = OTHER; note = 2'O-methyl uridine
  modified_base 12: mod_base = OTHER; note = 2'O-methyl cytidine
  modified_base 13: mod_base = OTHER; note = 2'O-methyl uridine
  modified_base 14: mod_base = OTHER; note = 2'-fluoro adenosine
  modified_base 15: mod_base = OTHER; note = 2'O-methyl uridine
  modified_base 16: mod_base = OTHER; note = 2'-fluoro cytidine
  modified_base 17: mod_base = OTHER; note = 2'O-methyl adenosine
  modified_base 18: mod_base = OTHER; note = 2'O-methyl guanosine
  modified_base 19: mod_base = OTHER; note = 2'O-methyl adenosine
  modified_base 20: mod_base = OTHER; note = 2'O-methyl cytidine
  modified_base 21: mod_base = OTHER; note = 2'O-methyl uridine phosphorothioate
  modified_base 22: mod_base = OTHER; note = 2'O-methyl uridine phosphorothioate
  modified_base 23: mod_base = OTHER; note = 2'O-methyl uridine
aagtattccatctatcagacttt

SEQ ID NO: 507 - RNA, 23 nt, synthetic construct
  source 1..23: mol_type = other RNA
  modified_base 1: mod_base = OTHER; note = 5' vinyl phosphonate 2'O-methyl uridine phosphorothioate
  modified_base 2: mod_base = OTHER; note = 2'-fluoro adenosine phosphorothioate
  modified_base 3: mod_base = OTHER; note = 2'O-methyl adenosine
  modified_base 4: mod_base = OTHER; note = 2'O-methyl guanosine
  modified_base 5: mod_base = OTHER; note = 2'O-methyl uridine
  modified_base 6: mod_base = OTHER; note = 2'-fluoro adenosine
  modified_base 7: mod_base = OTHER; note = 2'O-methyl uridine
  modified_base 8: mod_base = OTHER; note = 2'O-methyl uridine
  modified_base 9: mod_base = OTHER; note = 2'O-methyl cytidine
  modified_base 10: mod_base = OTHER; note = 2'O-methyl cytidine
  modified_base 11: mod_base = OTHER; note = 2'O-methyl adenosine
  modified_base 12: mod_base = OTHER; note = 2'O-methyl uridine
  modified_base 13: mod_base = OTHER; note = 2'O-methyl cytidine
  modified_base 14: mod_base = OTHER; note = 2'-fluoro uridine
  modified_base 15: mod_base = OTHER; note = 2'O-methyl adenosine
  modified_base 16: mod_base = OTHER; note = 2'-fluoro uridine
  modified_base 17: mod_base = OTHER; note = 2'O-methyl cytidine
  modified_base 18: mod_base = OTHER; note = 2'O-methyl adenosine
  modified_base 19: mod_base = OTHER; note = 2'O-methyl guanosine
  modified_base 20: mod_base = OTHER; note = 2'O-methyl adenosine
  modified_base 21: mod_base = OTHER; note = 2'O-methyl cytidine phosphorothioate
  modified_base 22: mod_base = OTHER; note = 2'O-methyl uridine phosphorothioate
  modified_base 23: mod_base = OTHER; note = 2'O-methyl uridine
taagtattccatctatcagactt

SEQ ID NO: 508 - RNA, 23 nt, synthetic construct
  source 1..23: mol_type = other RNA
  modified_base 1: mod_base = OTHER; note = 5' vinyl phosphonate 2'O-methyl uridine phosphorothioate
  modified_base 2: mod_base = OTHER; note = 2'-fluoro uridine phosphorothioate
  modified_base 3: mod_base = OTHER; note = 2'O-methyl adenosine
  modified_base 4: mod_base = OTHER; note = 2'O-methyl uridine
  modified_base 5: mod_base = OTHER; note = 2'O-methyl uridine
  modified_base 6: mod_base = OTHER; note = 2'-fluoro guanosine
  modified_base 7: mod_base = OTHER; note = 2'O-methyl guanosine
  modified_base 8: mod_base = OTHER; note = 2'O-methyl uridine
  modified_base 9: mod_base = OTHER; note = 2'O-methyl adenosine
  modified_base 10: mod_base = OTHER; note = 2'O-methyl adenosine
  modified_base 11: mod_base = OTHER; note = 2'O-methyl guanosine
  modified_base 12: mod_base = OTHER; note = 2'O-methyl uridine
  modified_base 13: mod_base = OTHER; note = 2'O-methyl adenosine
  modified_base 14: mod_base = OTHER; note = 2'-fluoro uridine
  modified_base 15: mod_base = OTHER; note = 2'O-methyl uridine
  modified_base 16: mod_base = OTHER; note = 2'-fluoro cytidine
  modified_base 17: mod_base = OTHER; note = 2'O-methyl cytidine
  modified_base 18: mod_base = OTHER; note = 2'O-methyl adenosine
  modified_base 19: mod_base = OTHER; note = 2'O-methyl uridine
  modified_base 20: mod_base = OTHER; note = 2'O-methyl cytidine
  modified_base 21: mod_base = OTHER; note = 2'O-methyl uridine phosphorothioate
  modified_base 22: mod_base = OTHER; note = 2'O-methyl uridine phosphorothioate
  modified_base 23: mod_base = OTHER; note = 2'O-methyl uridine
ttattggtaagtattccatcttt

SEQ ID NO: 509 - RNA, 23 nt, synthetic construct
  source 1..23: mol_type = other RNA
  modified_base 1: mod_base = OTHER; note = 5' vinyl phosphonate 2'O-methyl uridine phosphorothioate
  modified_base 2: mod_base = OTHER; note = 2'-fluoro uridine phosphorothioate
  modified_base 3: mod_base = OTHER; note = 2'O-methyl cytidine
  modified_base 4: mod_base = OTHER; note = 2'O-methyl uridine
  modified_base 5: mod_base = OTHER; note = 2'O-methyl uridine
  modified_base 6: mod_base = OTHER; note = 2'-fluoro adenosine
  modified_base 7: mod_base = OTHER; note = 2'O-methyl uridine
  modified_base 8: mod_base = OTHER; note = 2'O-methyl uridine
  modified_base 9: mod_base = OTHER; note = 2'O-methyl guanosine
  modified_base 10: mod_base = OTHER; note = 2'O-methyl guanosine
  modified_base 11: mod_base = OTHER; note = 2'O-methyl uridine
  modified_base 12: mod_base = OTHER; note = 2'O-methyl adenosine
  modified_base 13: mod_base = OTHER; note = 2'O-methyl adenosine
  modified_base 14: mod_base = OTHER; note = 2'-fluoro guanosine
  modified_base 15: mod_base = OTHER; note = 2'O-methyl uridine
  modified_base 16: mod_base = OTHER; note = 2'-fluoro adenosine
  modified_base 17: mod_base = OTHER; note = 2'O-methyl uridine
  modified_base 18: mod_base = OTHER; note = 2'O-methyl uridine
  modified_base 19: mod_base = OTHER; note = 2'O-methyl cytidine
  modified_base 20: mod_base = OTHER; note = 2'O-methyl cytidine
  modified_base 21: mod_base = OTHER; note = 2'O-methyl adenosine phosphorothioate
  modified_base 22: mod_base = OTHER; note = 2'O-methyl uridine phosphorothioate
  modified_base 23: mod_base = OTHER; note = 2'O-methyl uridine
ttcttattggtaagtattccatt

SEQ ID NO: 510 - RNA, 23 nt, synthetic construct
  source 1..23: mol_type = other RNA
  modified_base 1: mod_base = OTHER; note = 5' vinyl phosphonate 2'O-methyl uridine phosphorothioate
  modified_base 2: mod_base = OTHER; note = 2'-fluoro uridine phosphorothioate
  modified_base 3: mod_base = OTHER; note = 2'O-methyl uridine
  modified_base 4: mod_base = OTHER; note = 2'O-methyl uridine
  modified_base 5: mod_base = OTHER; note = 2'O-methyl cytidine
  modified_base 6: mod_base = OTHER; note = 2'-fluoro uridine
  modified_base 7: mod_base = OTHER; note = 2'O-methyl uridine
  modified_base 8: mod_base = OTHER; note = 2'O-methyl adenosine
  modified_base 9: mod_base = OTHER; note = 2'O-methyl uridine
  modified_base 10: mod_base = OTHER; note = 2'O-methyl uridine
  modified_base 11: mod_base = OTHER; note = 2'O-methyl guanosine
  modified_base 12: mod_base = OTHER; note = 2'O-methyl guanosine
  modified_base 13: mod_base = OTHER; note = 2'O-methyl uridine
  modified_base 14: mod_base = OTHER; note = 2'-fluoro adenosine
  modified_base 15: mod_base = OTHER; note = 2'O-methyl adenosine
  modified_base 16: mod_base = OTHER; note = 2'-fluoro guanosine
  modified_base 17: mod_base = OTHER; note = 2'O-methyl uridine
  modified_base 18: mod_base = OTHER; note = 2'O-methyl adenosine
  modified_base 19: mod_base = OTHER; note = 2'O-methyl uridine
  modified_base 20: mod_base = OTHER; note = 2'O-methyl uridine
  modified_base 21: mod_base = OTHER; note = 2'O-methyl cytidine phosphorothioate
  modified_base 22: mod_base = OTHER; note = 2'O-methyl uridine phosphorothioate
  modified_base 23: mod_base = OTHER; note = 2'O-methyl uridine
ttttcttattggtaagtattctt

SEQ ID NO: 511 - RNA, 23 nt, synthetic construct
  source 1..23: mol_type = other RNA
  modified_base 1: mod_base = OTHER; note = 5' vinyl phosphonate 2'O-methyl adenosine phosphorothioate
  modified_base 2: mod_base = OTHER; note = 2'-fluoro uridine phosphorothioate
  modified_base 3: mod_base = OTHER; note = 2'O-methyl uridine
  modified_base 4: mod_base = OTHER; note = 2'O-methyl uridine
  modified_base 5: mod_base = OTHER; note = 2'O-methyl uridine
  modified_base 6: mod_base = OTHER; note = 2'-fluoro cytidine
  modified_base 7: mod_base = OTHER; note = 2'O-methyl uridine
  modified_base 8: mod_base = OTHER; note = 2'O-methyl uridine
  modified_base 9: mod_base = OTHER; note = 2'O-methyl adenosine
  modified_base 10: mod_base = OTHER; note = 2'O-methyl uridine
  modified_base 11: mod_base = OTHER; note = 2'O-methyl uridine
  modified_base 12: mod_base = OTHER; note = 2'O-methyl guanosine
  modified_base 13: mod_base = OTHER; note = 2'O-methyl guanosine
  modified_base 14: mod_base = OTHER; note = 2'-fluoro uridine
  modified_base 15: mod_base = OTHER; note = 2'O-methyl adenosine
  modified_base 16: mod_base = OTHER; note = 2'-fluoro adenosine
  modified_base 17: mod_base = OTHER; note = 2'O-methyl guanosine
  modified_base 18: mod_base = OTHER; note = 2'O-methyl uridine
  modified_base 19: mod_base = OTHER; note = 2'O-methyl adenosine
  modified_base 20: mod_base = OTHER; note = 2'O-methyl uridine
  modified_base 21: mod_base = OTHER; note = 2'O-methyl uridine phosphorothioate
  modified_base 22: mod_base = OTHER; note = 2'O-methyl uridine phosphorothioate
  modified_base 23: mod_base = OTHER; note = 2'O-methyl uridine
attttcttattggtaagtatttt

SEQ ID NO: 512 - RNA, 23 nt, synthetic construct
  source 1..23: mol_type = other RNA
  modified_base 1: mod_base = OTHER; note = 5' vinyl phosphonate 2'O-methyl adenosine phosphorothioate
  modified_base 2: mod_base = OTHER; note = 2'-fluoro uridine phosphorothioate
  modified_base 3: mod_base = OTHER; note = 2'O-methyl cytidine
  modified_base 4: mod_base = OTHER; note = 2'O-methyl adenosine
  modified_base 5: mod_base = OTHER; note = 2'O-methyl uridine
  modified_base 6: mod_base = OTHER; note = 2'-fluoro uridine
  modified_base 7: mod_base = OTHER; note = 2'O-methyl uridine
  modified_base 8: mod_base = OTHER; note = 2'O-methyl uridine
  modified_base 9: mod_base = OTHER; note = 2'O-methyl cytidine
  modified_base 10: mod_base = OTHER; note = 2'O-methyl uridine
  modified_base 11: mod_base = OTHER; note = 2'O-methyl uridine
  modified_base 12: mod_base = OTHER; note = 2'O-methyl adenosine
  modified_base 13: mod_base = OTHER; note = 2'O-methyl uridine
  modified_base 14: mod_base = OTHER; note = 2'-fluoro uridine
  modified_base 15: mod_base = OTHER; note = 2'O-methyl guanosine
  modified_base 16: mod_base = OTHER; note = 2'-fluoro guanosine
  modified_base 17: mod_base = OTHER; note = 2'O-methyl uridine
  modified_base 18: mod_base = OTHER; note = 2'O-methyl adenosine
  modified_base 19: mod_base = OTHER; note = 2'O-methyl adenosine
  modified_base 20: mod_base = OTHER; note = 2'O-methyl guanosine
  modified_base 21: mod_base = OTHER; note = 2'O-methyl uridine phosphorothioate
  modified_base 22: mod_base = OTHER; note = 2'O-methyl uridine phosphorothioate
  modified_base 23: mod_base = OTHER; note = 2'O-methyl uridine
atcattttcttattggtaagttt

SEQ ID NO: 513 - RNA, 23 nt, synthetic construct
  source 1..23: mol_type = other RNA
  modified_base 1: mod_base = OTHER; note = 5' vinyl phosphonate 2'O-methyl adenosine phosphorothioate
  modified_base 2: mod_base = OTHER; note = 2'-fluoro adenosine phosphorothioate
  modified_base 3: mod_base = OTHER; note = 2'O-methyl uridine
  modified_base 4: mod_base = OTHER; note = 2'O-methyl cytidine
  modified_base 5: mod_base = OTHER; note = 2'O-methyl adenosine
  modified_base 6: mod_base = OTHER; note = 2'-fluoro uridine
  modified_base 7: mod_base = OTHER; note = 2'O-methyl uridine
  modified_base 8: mod_base = OTHER; note = 2'O-methyl uridine
  modified_base 9: mod_base = OTHER; note = 2'O-methyl uridine
  modified_base 10: mod_base = OTHER; note = 2'O-methyl cytidine
  modified_base 11: mod_base = OTHER; note = 2'O-methyl uridine
  modified_base 12: mod_base = OTHER; note = 2'O-methyl uridine
  modified_base 13: mod_base = OTHER; note = 2'O-methyl adenosine
  modified_base 14: mod_base = OTHER; note = 2'-fluoro uridine
  modified_base 15: mod_base = OTHER; note = 2'O-methyl uridine
  modified_base 16: mod_base = OTHER; note = 2'-fluoro guanosine
  modified_base 17: mod_base = OTHER; note = 2'O-methyl guanosine
  modified_base 18: mod_base = OTHER; note = 2'O-methyl uridine
  modified_base 19: mod_base = OTHER; note = 2'O-methyl adenosine
  modified_base 20: mod_base = OTHER; note = 2'O-methyl adenosine
  modified_base 21: mod_base = OTHER; note = 2'O-methyl guanosine phosphorothioate
  modified_base 22: mod_base = OTHER; note = 2'O-methyl uridine phosphorothioate
  modified_base 23: mod_base = OTHER; note = 2'O-methyl uridine
aatcattttcttattggtaagtt

SEQ ID NO: 514 - RNA, 23 nt, synthetic construct
  source 1..23: mol_type = other RNA
  modified_base 1: mod_base = OTHER; note = 5' vinyl phosphonate 2'O-methyl adenosine phosphorothioate
  modified_base 2: mod_base = OTHER; note = 2'-fluoro adenosine phosphorothioate
  modified_base 3: mod_base = OTHER; note = 2'O-methyl adenosine
  modified_base 4: mod_base = OTHER; note = 2'O-methyl uridine
  modified_base 5: mod_base = OTHER; note = 2'O-methyl cytidine
  modified_base 6: mod_base = OTHER; note = 2'-fluoro adenosine
  modified_base 7: mod_base = OTHER; note = 2'O-methyl uridine
  modified_base 8: mod_base = OTHER; note = 2'O-methyl uridine
  modified_base 9: mod_base = OTHER; note = 2'O-methyl uridine
  modified_base 10: mod_base = OTHER; note = 2'O-methyl uridine
  modified_base 11: mod_base = OTHER; note = 2'O-methyl cytidine
  modified_base 12: mod_base = OTHER; note = 2'O-methyl uridine
  modified_base 13: mod_base = OTHER; note = 2'O-methyl uridine
  modified_base 14: mod_base = OTHER; note = 2'-fluoro adenosine
  modified_base 15: mod_base = OTHER; note = 2'O-methyl uridine
  modified_base 16: mod_base = OTHER; note = 2'-fluoro uridine
  modified_base 17: mod_base = OTHER; note = 2'O-methyl guanosine
  modified_base 18: mod_base = OTHER; note = 2'O-methyl guanosine
  modified_base 19: mod_base = OTHER; note = 2'O-methyl uridine
  modified_base 20: mod_base = OTHER; note = 2'O-methyl adenosine
  modified_base 21: mod_base = OTHER; note = 2'O-methyl adenosine phosphorothioate
  modified_base 22: mod_base = OTHER; note = 2'O-methyl uridine phosphorothioate
  modified_base 23: mod_base = OTHER; note = 2'O-methyl uridine
aaatcattttcttattggtaatt

SEQ ID NO: 515 - RNA, 23 nt, synthetic construct
  source 1..23: mol_type = other RNA
  modified_base 1: mod_base = OTHER; note = 5' vinyl phosphonate 2'O-methyl adenosine phosphorothioate
  modified_base 2: mod_base = OTHER; note = 2'-fluoro adenosine phosphorothioate
  modified_base 3: mod_base = OTHER; note = 2'O-methyl adenosine
  modified_base 4: mod_base = OTHER; note = 2'O-methyl adenosine
  modified_base 5: mod_base = OTHER; note = 2'O-methyl uridine
  modified_base 6: mod_base = OTHER; note = 2'-fluoro cytidine
  modified_base 7: mod_base = OTHER; note = 2'O-methyl adenosine
  modified_base 8: mod_base = OTHER; note = 2'O-methyl uridine
  modified_base 9: mod_base = OTHER; note = 2'O-methyl uridine
  modified_base 10: mod_base = OTHER; note = 2'O-methyl uridine
  modified_base 11: mod_base = OTHER; note = 2'O-methyl uridine
  modified_base 12: mod_base = OTHER; note = 2'O-methyl cytidine
  modified_base 13: mod_base = OTHER; note = 2'O-methyl uridine
  modified_base 14: mod_base = OTHER; note = 2'-fluoro uridine
  modified_base 15: mod_base = OTHER; note = 2'O-methyl adenosine
  modified_base 16: mod_base = OTHER; note = 2'-fluoro uridine
  modified_base 17: mod_base = OTHER; note = 2'O-methyl uridine
  modified_base 18: mod_base = OTHER; note = 2'O-methyl guanosine
  modified_base 19: mod_base = OTHER; note = 2'O-methyl guanosine
  modified_base 20: mod_base = OTHER; note = 2'O-methyl uridine
  modified_base 21: mod_base = OTHER; note = 2'O-methyl adenosine phosphorothioate
  modified_base 22: mod_base = OTHER; note = 2'O-methyl uridine phosphorothioate
  modified_base 23: mod_base = OTHER; note = 2'O-methyl uridine
aaaatcattttcttattggtatt

SEQ ID NO: 516 - RNA, 23 nt, synthetic construct
  source 1..23: mol_type = other RNA
  modified_base 1: mod_base = OTHER; note = 5' vinyl phosphonate 2'O-methyl adenosine phosphorothioate
  modified_base 2: mod_base = OTHER; note = 2'-fluoro adenosine phosphorothioate
  modified_base 3: mod_base = OTHER; note = 2'O-methyl adenosine
  modified_base 4: mod_base = OTHER; note = 2'O-methyl adenosine
  modified_base 5: mod_base = OTHER; note = 2'O-methyl adenosine
  modified_base 6: mod_base = OTHER; note = 2'-fluoro uridine
  modified_base 7: mod_base = OTHER; note = 2'O-methyl cytidine
  modified_base 8: mod_base = OTHER; note = 2'O-methyl adenosine
  modified_base 9: mod_base = OTHER; note = 2'O-methyl uridine
  modified_base 10: mod_base = OTHER; note = 2'O-methyl uridine
  modified_base 11: mod_base = OTHER; note = 2'O-methyl uridine
  modified_base 12: mod_base = OTHER; note = 2'O-methyl uridine
  modified_base 13: mod_base = OTHER; note = 2'O-methyl cytidine
  modified_base 14: mod_base = OTHER; note = 2'-fluoro uridine
  modified_base 15: mod_base = OTHER; note = 2'O-methyl uridine
  modified_base 16: mod_base = OTHER; note = 2'-fluoro adenosine
  modified_base 17: mod_base = OTHER; note = 2'O-methyl uridine
  modified_base 18: mod_base = OTHER; note = 2'O-methyl uridine
  modified_base 19: mod_base = OTHER; note = 2'O-methyl guanosine
  modified_base 20: mod_base = OTHER; note = 2'O-methyl guanosine
  modified_base 21: mod_base = OTHER; note = 2'O-methyl uridine phosphorothioate
  modified_base 22: mod_base = OTHER; note = 2'O-methyl uridine phosphorothioate
  modified_base 23: mod_base = OTHER; note = 2'O-methyl uridine
aaaaatcattttcttattggttt

SEQ ID NO: 517 - RNA, 23 nt, synthetic construct
  source 1..23: mol_type = other RNA
  modified_base 1: mod_base = OTHER; note = 5' vinyl phosphonate 2'O-methyl adenosine phosphorothioate
  modified_base 2: mod_base = OTHER; note = 2'-fluoro cytidine phosphorothioate
  modified_base 3: mod_base = OTHER; note = 2'O-methyl adenosine
  modified_base 4: mod_base = OTHER; note = 2'O-methyl adenosine
  modified_base 5: mod_base = OTHER; note = 2'O-methyl adenosine
  modified_base 6: mod_base = OTHER; note = 2'-fluoro adenosine
  modified_base 7: mod_base = OTHER; note = 2'O-methyl adenosine
  modified_base 8: mod_base = OTHER; note = 2'O-methyl uridine
  modified_base 9: mod_base = OTHER; note = 2'O-methyl cytidine
  modified_base 10: mod_base = OTHER; note = 2'O-methyl adenosine
  modified_base 11: mod_base = OTHER; note = 2'O-methyl uridine
  modified_base 12: mod_base = OTHER; note = 2'O-methyl uridine
  modified_base 13: mod_base = OTHER; note = 2'O-methyl uridine
  modified_base 14: mod_base = OTHER; note = 2'-fluoro uridine
  modified_base 15: mod_base = OTHER; note = 2'O-methyl cytidine
  modified_base 16: mod_base = OTHER; note = 2'-fluoro uridine
  modified_base 17: mod_base = OTHER; note = 2'O-methyl uridine
  modified_base 18: mod_base = OTHER; note = 2'O-methyl adenosine
  modified_base 19: mod_base = OTHER; note = 2'O-methyl uridine
  modified_base 20: mod_base = OTHER; note = 2'O-methyl uridine
  modified_base 21: mod_base = OTHER; note = 2'O-methyl guanosine phosphorothioate
  modified_base 22: mod_base = OTHER; note = 2'O-methyl uridine phosphorothioate
  modified_base 23: mod_base = OTHER; note = 2'O-methyl uridine
acaaaaatcattttcttattgtt

SEQ ID NO: 518 - RNA, 23 nt, synthetic construct
  source 1..23: mol_type = other RNA
  modified_base 1: mod_base = OTHER; note = 5' vinyl phosphonate 2'O-methyl adenosine phosphorothioate
  modified_base 2: mod_base = OTHER; note = 2'-fluoro adenosine phosphorothioate
  modified_base 3: mod_base = OTHER; note = 2'O-methyl cytidine
  modified_base 4: mod_base = OTHER; note = 2'O-methyl adenosine
  modified_base 5: mod_base = OTHER; note = 2'O-methyl adenosine
  modified_base 6: mod_base = OTHER; note = 2'-fluoro adenosine
  modified_base 7: mod_base = OTHER; note = 2'O-methyl adenosine
  modified_base 8: mod_base = OTHER; note = 2'O-methyl adenosine
  modified_base 9: mod_base = OTHER; note = 2'O-methyl uridine
  modified_base 10: mod_base = OTHER; note = 2'O-methyl cytidine
  modified_base 11: mod_base = OTHER; note = 2'O-methyl adenosine
  modified_base 12: mod_base = OTHER; note = 2'O-methyl uridine
  modified_base 13: mod_base = OTHER; note = 2'O-methyl uridine
  modified_base 14: mod_base = OTHER; note = 2'-fluoro uridine
  modified_base 15: mod_base = OTHER; note = 2'O-methyl uridine
  modified_base 16: mod_base = OTHER; note = 2'-fluoro cytidine
  modified_base 17: mod_base = OTHER; note = 2'O-methyl uridine
  modified_base 18: mod_base = OTHER; note = 2'O-methyl uridine
  modified_base 19: mod_base = OTHER; note = 2'O-methyl adenosine
  modified_base 20: mod_base = OTHER; note = 2'O-methyl uridine
  modified_base 21: mod_base = OTHER; note = 2'O-methyl uridine phosphorothioate
  modified_base 22: mod_base = OTHER; note = 2'O-methyl uridine phosphorothioate
  modified_base 23: mod_base = OTHER; note = 2'O-methyl uridine
aacaaaaatcattttcttatttt

SEQ ID NO: 519 - RNA, 23 nt, synthetic construct
  source 1..23: mol_type = other RNA
  modified_base 1: mod_base = OTHER; note = 5' vinyl phosphonate 2'O-methyl uridine phosphorothioate
  modified_base 2: mod_base = OTHER; note = 2'-fluoro guanosine phosphorothioate
  modified_base 3: mod_base = OTHER; note = 2'O-methyl guanosine
  modified_base 4: mod_base = OTHER; note = 2'O-methyl adenosine
  modified_base 5: mod_base = OTHER; note = 2'O-methyl adenosine
  modified_base 6: mod_base = OTHER; note = 2'-fluoro cytidine
  modified_base 7: mod_base = OTHER; note = 2'O-methyl adenosine
  modified_base 8: mod_base = OTHER; note = 2'O-methyl adenosine
  modified_base 9: mod_base = OTHER; note = 2'O-methyl adenosine
  modified_base 10: mod_base = OTHER; note = 2'O-methyl adenosine
  modified_base 11: mod_base = OTHER; note = 2'O-methyl adenosine
  modified_base 12: mod_base = OTHER; note = 2'O-methyl uridine
  modified_base 13: mod_base = OTHER; note = 2'O-methyl cytidine
  modified_base 14: mod_base = OTHER; note = 2'-fluoro adenosine
  modified_base 15: mod_base = OTHER; note = 2'O-methyl uridine
  modified_base 16: mod_base = OTHER; note = 2'-fluoro uridine
  modified_base 17: mod_base = OTHER; note = 2'O-methyl uridine
  modified_base 18: mod_base = OTHER; note = 2'O-methyl uridine
  modified_base 19: mod_base = OTHER; note = 2'O-methyl cytidine
  modified_base 20: mod_base = OTHER; note = 2'O-methyl uridine
  modified_base 21: mod_base = OTHER; note = 2'O-methyl uridine phosphorothioate
  modified_base 22: mod_base = OTHER; note = 2'O-methyl uridine phosphorothioate
  modified_base 23: mod_base = OTHER; note = 2'O-methyl uridine
tggaacaaaaatcattttctttt

SEQ ID NO: 520 - RNA, 23 nt, synthetic construct
  source 1..23: mol_type = other RNA
  modified_base 1: mod_base = OTHER; note = 5' vinyl phosphonate 2'O-methyl adenosine phosphorothioate
  modified_base 2: mod_base = OTHER; note = 2'-fluoro uridine phosphorothioate
  modified_base 3: mod_base = OTHER; note = 2'O-methyl guanosine
  modified_base 4: mod_base = OTHER; note = 2'O-methyl guanosine
  modified_base 5: mod_base = OTHER; note = 2'O-methyl adenosine
  modified_base 6: mod_base = OTHER; note = 2'-fluoro adenosine
  modified_base 7: mod_base = OTHER; note = 2'O-methyl cytidine
  modified_base 8: mod_base = OTHER; note = 2'O-methyl adenosine
  modified_base 9: mod_base = OTHER; note = 2'O-methyl adenosine
  modified_base 10: mod_base = OTHER; note = 2'O-methyl adenosine
  modified_base 11: mod_base = OTHER; note = 2'O-methyl adenosine
  modified_base 12: mod_base = OTHER; note = 2'O-methyl adenosine
  modified_base 13: mod_base = OTHER; note = 2'O-methyl uridine
  modified_base 14: mod_base = OTHER; note = 2'-fluoro cytidine
  modified_base 15: mod_base = OTHER; note = 2'O-methyl adenosine
  modified_base 16: mod_base = OTHER; note = 2'-fluoro uridine
  modified_base 17: mod_base = OTHER; note = 2'O-methyl uridine
  modified_base 18: mod_base = OTHER; note = 2'O-methyl uridine
  modified_base 19: mod_base = OTHER; note = 2'O-methyl uridine
  modified_base 20: mod_base = OTHER; note = 2'O-methyl cytidine
  modified_base 21: mod_base = OTHER; note = 2'O-methyl uridine phosphorothioate
  modified_base 22: mod_base = OTHER; note = 2'O-methyl uridine phosphorothioate
  modified_base 23: mod_base = OTHER; note = 2'O-methyl uridine
atggaacaaaaatcattttcttt

SEQ ID NO: 521 - RNA, 23 nt, synthetic construct
  source 1..23: mol_type = other RNA
  modified_base 1: mod_base = OTHER; note = 5' vinyl phosphonate 2'O-methyl uridine phosphorothioate
  modified_base 2: mod_base = OTHER; note = 2'-fluoro adenosine phosphorothioate
  modified_base 3: mod_base = OTHER; note = 2'O-methyl cytidine
  modified_base 4: mod_base = OTHER; note = 2'O-methyl guanosine
  modified_base 5: mod_base = OTHER; note = 2'O-methyl adenosine
  modified_base 6: mod_base = OTHER; note = 2'-fluoro uridine
  modified_base 7: mod_base = OTHER; note = 2'O-methyl guanosine
  modified_base 8: mod_base = OTHER; note = 2'O-methyl guanosine
  modified_base 9: mod_base = OTHER; note = 2'O-methyl adenosine
  modified_base 10: mod_base = OTHER; note = 2'O-methyl adenosine
  modified_base 11: mod_base = OTHER; note = 2'O-methyl cytidine
  modified_base 12: mod_base = OTHER; note = 2'O-methyl adenosine
  modified_base 13: mod_base = OTHER; note = 2'O-methyl adenosine
  modified_base 14: mod_base = OTHER; note = 2'-fluoro adenosine
  modified_base 15: mod_base = OTHER; note = 2'O-methyl adenosine
  modified_base 16: mod_base = OTHER; note = 2'-fluoro adenosine
  modified_base 17: mod_base = OTHER; note = 2'O-methyl uridine
  modified_base 18: mod_base = OTHER; note = 2'O-methyl cytidine
  modified_base 19: mod_base = OTHER; note = 2'O-methyl adenosine
  modified_base 20: mod_base = OTHER; note = 2'O-methyl uridine
  modified_base 21: mod_base = OTHER; note = 2'O-methyl uridine phosphorothioate
  modified_base 22: mod_base = OTHER; note = 2'O-methyl uridine phosphorothioate
  modified_base 23: mod_base = OTHER; note = 2'O-methyl uridine
tacgatggaacaaaaatcatttt

SEQ ID NO: 522 - RNA, 23 nt, synthetic construct
  source 1..23: mol_type = other RNA
  modified_base 1: mod_base = OTHER; note = 5' vinyl phosphonate 2'O-methyl adenosine phosphorothioate
  modified_base 2: mod_base = OTHER; note = 2'-fluoro uridine phosphorothioate
  modified_base 3: mod_base = OTHER; note = 2'O-methyl adenosine
  modified_base 4: mod_base = OTHER; note = 2'O-methyl cytidine
  modified_base 5: mod_base = OTHER; note = 2'O-methyl guanosine
  modified_base 6: mod_base = OTHER; note = 2'-fluoro adenosine
  modified_base 7: mod_base = OTHER; note = 2'O-methyl uridine
  modified_base 8: mod_base = OTHER; note = 2'O-methyl guanosine
  modified_base 9: mod_base = OTHER; note = 2'O-methyl guanosine
  modified_base 10: mod_base = OTHER; note = 2'O-methyl adenosine
  modified_base 11: mod_base = OTHER; note = 2'O-methyl adenosine
  modified_base 12: mod_base = OTHER; note = 2'O-methyl cytidine
  modified_base 13: mod_base = OTHER; note = 2'O-methyl adenosine
  modified_base 14: mod_base = OTHER; note = 2'-fluoro adenosine
  modified_base 15: mod_base = OTHER; note = 2'O-methyl adenosine
  modified_base 16: mod_base = OTHER; note = 2'-fluoro adenosine
  modified_base 17: mod_base = OTHER; note = 2'O-methyl adenosine
  modified_base 18: mod_base = OTHER; note = 2'O-methyl uridine
  modified_base 19: mod_base = OTHER; note = 2'O-methyl cytidine
  modified_base 20: mod_base = OTHER; note = 2'O-methyl adenosine
  modified_base 21: mod_base = OTHER; note = 2'O-methyl uridine phosphorothioate
  modified_base 22: mod_base = OTHER; note = 2'O-methyl uridine phosphorothioate
  modified_base 23: mod_base = OTHER; note = 2'O-methyl uridine
atacgatggaacaaaaatcattt

SEQ ID NO: 523 - RNA, 23 nt, synthetic construct
  source 1..23: mol_type = other RNA
  modified_base 1: mod_base = OTHER; note = 5' vinyl phosphonate 2'O-methyl uridine phosphorothioate
  modified_base 2: mod_base = OTHER; note = 2'-fluoro uridine phosphorothioate
  modified_base 3: mod_base = OTHER; note = 2'O-methyl guanosine
  modified_base 4: mod_base = OTHER; note = 2'O-methyl adenosine
  modified_base 5: mod_base = OTHER; note = 2'O-methyl uridine
  modified_base 6: mod_base = OTHER; note = 2'-fluoro adenosine
  modified_base 7: mod_base = OTHER; note = 2'O-methyl uridine
  modified_base 8: mod_base = OTHER; note = 2'O-methyl adenosine
  modified_base 9: mod_base = OTHER; note = 2'O-methyl cytidine
  modified_base 10: mod_base = OTHER; note = 2'O-methyl guanosine
  modified_base 11: mod_base = OTHER; note = 2'O-methyl adenosine
  modified_base 12: mod_base = OTHER; note = 2'O-methyl uridine
  modified_base 13: mod_base = OTHER; note = 2'O-methyl guanosine
  modified_base 14: mod_base = OTHER; note = 2'-fluoro guanosine
  modified_base 15: mod_base = OTHER; note = 2'O-methyl adenosine
  modified_base 16: mod_base = OTHER; note = 2'-fluoro adenosine
  modified_base 17: mod_base = OTHER; note = 2'O-methyl cytidine
  modified_base 18: mod_base = OTHER; note = 2'O-methyl adenosine
  modified_base 19: mod_base = OTHER; note = 2'O-methyl adenosine
  modified_base 20: mod_base = OTHER; note = 2'O-methyl adenosine
  modified_base 21: mod_base = OTHER; note = 2'O-methyl adenosine phosphorothioate
  modified_base 22: mod_base = OTHER; note = 2'O-methyl uridine phosphorothioate
  modified_base 23: mod_base = OTHER; note = 2'O-methyl uridine
ttgatatacgatggaacaaaatt

SEQ ID NO: 524 - RNA, 23 nt, synthetic construct
  source 1..23: mol_type = other RNA
  modified_base 1: mod_base = OTHER; note = 5' vinyl phosphonate 2'O-methyl adenosine phosphorothioate
  modified_base 2: mod_base = OTHER; note = 2'-fluoro uridine phosphorothioate
  modified_base 3: mod_base = OTHER; note = 2'O-methyl uridine
  modified_base 4: mod_base = OTHER; note = 2'O-methyl guanosine
  modified_base 5: mod_base = OTHER; note = 2'O-methyl adenosine
  modified_base 6: mod_base = OTHER; note = 2'-fluoro uridine
  modified_base 7: mod_base = OTHER; note = 2'O-methyl adenosine
  modified_base 8: mod_base = OTHER; note = 2'O-methyl uridine
  modified_base 9: mod_base = OTHER; note = 2'O-methyl adenosine
  modified_base 10: mod_base = OTHER; note = 2'O-methyl cytidine
  modified_base 11: mod_base = OTHER; note = 2'O-methyl guanosine
  modified_base 12: mod_base = OTHER; note = 2'O-methyl adenosine
  modified_base 13: mod_base = OTHER; note = 2'O-methyl uridine
  modified_base 14: mod_base = OTHER; note = 2'-fluoro guanosine
  modified_base 15: mod_base = OTHER; note = 2'O-methyl guanosine
  modified_base 16: mod_base = OTHER; note = 2'-fluoro adenosine
  modified_base 17: mod_base = OTHER; note = 2'O-methyl adenosine
  modified_base 18: mod_base = OTHER; note = 2'O-methyl cytidine
  modified_base 19: mod_base = OTHER; note = 2'O-methyl adenosine
  modified_base 20: mod_base = OTHER; note = 2'O-methyl adenosine
  modified_base 21: mod_base = OTHER; note = 2'O-methyl adenosine phosphorothioate
  modified_base 22: mod_base = OTHER; note = 2'O-methyl uridine phosphorothioate
  modified_base 23: mod_base = OTHER; note = 2'O-methyl uridine
attgatatacgatggaacaaatt

SEQ ID NO: 525 - RNA, 23 nt, synthetic construct
  source 1..23: mol_type = other RNA
  modified_base 1: mod_base = OTHER; note = 5' vinyl phosphonate 2'O-methyl uridine phosphorothioate
  modified_base 2: mod_base = OTHER; note = 2'-fluoro uridine phosphorothioate
  modified_base 3: mod_base = OTHER; note = 2'O-methyl uridine
  modified_base 4: mod_base = OTHER; note = 2'O-methyl uridine
  modified_base 5: mod_base = OTHER; note = 2'O-methyl cytidine
  modified_base 6: mod_base = OTHER; note = 2'-fluoro uridine
  modified_base 7: mod_base = OTHER; note = 2'O-methyl cytidine
  modified_base 8: mod_base = OTHER; note = 2'O-methyl cytidine
  modified_base 9: mod_base = OTHER; note = 2'O-methyl uridine
  modified_base 10: mod_base = OTHER; note = 2'O-methyl cytidine
  modified_base 11: mod_base = OTHER; note = 2'O-methyl uridine
  modified_base 12: mod_base = OTHER; note = 2'O-methyl guanosine
  modified_base 13: mod_base = OTHER; note = 2'O-methyl adenosine
  modified_base 14: mod_base = OTHER; note = 2'-fluoro guanosine
  modified_base 15: mod_base = OTHER; note = 2'O-methyl guanosine
  modified_base 16: mod_base = OTHER; note = 2'-fluoro adenosine
  modified_base 17: mod_base = OTHER; note = 2'O-methyl adenosine
  modified_base 18: mod_base = OTHER; note = 2'O-methyl uridine
  modified_base 19: mod_base = OTHER; note = 2'O-methyl guanosine
  modified_base 20: mod_base = OTHER; note = 2'O-methyl adenosine
  modified_base 21: mod_base = OTHER; note = 2'O-methyl adenosine phosphorothioate
  modified_base 22: mod_base = OTHER; note = 2'O-methyl uridine phosphorothioate
  modified_base 23: mod_base = OTHER; note = 2'O-methyl uridine
ttttctcctctgaggaatgaatt

SEQ ID NO: 526 - RNA, 23 nt, synthetic construct
  source 1..23: mol_type = other RNA
  modified_base 1: mod_base = OTHER; note = 5' vinyl phosphonate 2'O-methyl uridine phosphorothioate
  modified_base 2: mod_base = OTHER; note = 2'-fluoro uridine phosphorothioate
  modified_base 3: mod_base = OTHER; note = 2'O-methyl adenosine
  modified_base 4: mod_base = OTHER; note = 2'O-methyl cytidine
  modified_base 5: mod_base = OTHER; note = 2'O-methyl adenosine
  modified_base 6: mod_base = OTHER; note = 2'-fluoro uridine
  modified_base 7: mod_base = OTHER; note = 2'O-methyl cytidine
  modified_base 8: mod_base = OTHER; note = 2'O-methyl adenosine
  modified_base 9: mod_base = OTHER; note = 2'O-methyl cytidine
  modified_base 10: mod_base = OTHER; note = 2'O-methyl cytidine
  modified_base 11: mod_base = OTHER; note = 2'O-methyl cytidine
  modified_base 12: mod_base = OTHER; note = 2'O-methyl adenosine
  modified_base 13: mod_base = OTHER; note = 2'O-methyl cytidine
  modified_base 14: mod_base = OTHER; note = 2'-fluoro uridine
  modified_base 15: mod_base = OTHER; note = 2'O-methyl uridine
  modified_base 16: mod_base = OTHER; note = 2'-fluoro cytidine
  modified_base 17: mod_base = OTHER; note = 2'O-methyl uridine
  modified_base 18: mod_base = OTHER; note = 2'O-methyl uridine
  modified_base 19: mod_base = OTHER; note = 2'O-methyl uridine
  modified_base 20: mod_base = OTHER; note = 2'O-methyl cytidine
  modified_base 21: mod_base = OTHER; note = 2'O-methyl uridine phosphorothioate
  modified_base 22: mod_base = OTHER; note = 2'O-methyl uridine phosphorothioate
  modified_base 23: mod_base = OTHER; note = 2'O-methyl uridine
ttacatcacccacttctttcttt

SEQ ID NO: 527 - RNA, 23 nt, synthetic construct
  source 1..23: mol_type = other RNA
  modified_base 1: mod_base = OTHER; note = 5' vinyl phosphonate 2'O-methyl uridine phosphorothioate
  modified_base 2: mod_base = OTHER; note = 2'-fluoro uridine phosphorothioate
  modified_base 3: mod_base = OTHER; note = 2'O-methyl guanosine
  modified_base 4: mod_base = OTHER; note = 2'O-methyl guanosine
  modified_base 5: mod_base = OTHER; note = 2'O-methyl uridine
  modified_base 6: mod_base = OTHER; note = 2'-fluoro adenosine
  modified_base 7: mod_base = OTHER; note = 2'O-methyl adenosine
  modified_base 8: mod_base = OTHER; note = 2'O-methyl uridine
  modified_base 9: mod_base = OTHER; note = 2'O-methyl cytidine
  modified_base 10: mod_base = OTHER; note = 2'O-methyl uridine
  modified_base 11: mod_base = OTHER; note = 2'O-methyl cytidine
  modified_base 12: mod_base = OTHER; note = 2'O-methyl uridine
  modified_base 13: mod_base = OTHER; note = 2'O-methyl uridine
  modified_base 14: mod_base = OTHER; note = 2'-fluoro cytidine
  modified_base 15: mod_base = OTHER; note = 2'O-methyl adenosine
  modified_base 16: mod_base = OTHER; note = 2'-fluoro uridine
  modified_base 17: mod_base = OTHER; note = 2'O-methyl cytidine
  modified_base 18: mod_base = OTHER; note = 2'O-methyl cytidine
  modified_base 19: mod_base = OTHER; note = 2'O-methyl uridine
  modified_base 20: mod_base = OTHER; note = 2'O-methyl uridine
  modified_base 21: mod_base = OTHER; note = 2'O-methyl guanosine phosphorothioate
  modified_base 22: mod_base = OTHER; note = 2'O-methyl uridine phosphorothioate
  modified_base 23: mod_base = OTHER; note = 2'O-methyl uridine
ttggtaatctcttcatccttgtt

SEQ ID NO: 528 - RNA, 23 nt, synthetic construct
  source 1..23: mol_type = other RNA
  modified_base 1: mod_base = OTHER; note = 5' vinyl phosphonate 2'O-methyl uridine phosphorothioate
  modified_base 2: mod_base = OTHER; note = 2'-fluoro guanosine phosphorothioate
  modified_base 3: mod_base = OTHER; note = 2'O-methyl uridine
  modified_base 4: mod_base = OTHER; note = 2'O-methyl guanosine
  modified_base 5: mod_base = OTHER; note = 2'O-methyl adenosine
  modified_base 6: mod_base = OTHER; note = 2'-fluoro uridine
  modified_base 7: mod_base = OTHER; note = 2'O-methyl cytidine
  modified_base 8: mod_base = OTHER; note = 2'O-methyl cytidine
  modified_base 9: mod_base = OTHER; note = 2'O-methyl adenosine
  modified_base 10: mod_base = OTHER; note = 2'O-methyl adenosine
  modified_base 11: mod_base = OTHER; note = 2'O-methyl adenosine
  modified_base 12: mod_base = OTHER; note = 2'O-methyl adenosine
  modified_base 13: mod_base = OTHER; note = 2'O-methyl adenosine
  modified_base 14: mod_base = OTHER; note = 2'-fluoro uridine
  modified_base 15: mod_base = OTHER; note = 2'O-methyl guanosine
  modified_base 16: mod_base = OTHER; note = 2'-fluoro uridine
  modified_base 17: mod_base = OTHER; note = 2'O-methyl cytidine
  modified_base 18: mod_base = OTHER; note = 2'O-methyl cytidine
  modified_base 19: mod_base = OTHER; note = 2'O-methyl uridine
  modified_base 20: mod_base = OTHER; note = 2'O-methyl adenosine
  modified_base 21: mod_base = OTHER; note = 2'O-methyl guanosine phosphorothioate
  modified_base 22: mod_base = OTHER; note = 2'O-methyl uridine phosphorothioate
  modified_base 23: mod_base = OTHER; note = 2'O-methyl uridine
tgtgatccaaaaatgtcctagtt

SEQ ID NO: 529 - RNA, 23 nt, synthetic construct
  source 1..23: mol_type = other RNA
  modified_base 1: mod_base = OTHER; note = 5' vinyl phosphonate 2'O-methyl adenosine phosphorothioate
  modified_base 2: mod_base = OTHER; note = 2'-fluoro adenosine phosphorothioate
  modified_base 3: mod_base = OTHER; note = 2'O-methyl guanosine
  modified_base 4: mod_base = OTHER; note = 2'O-methyl adenosine
  modified_base 5: mod_base = OTHER; note = 2'O-methyl adenosine
  modified_base 6: mod_base = OTHER; note = 2'-fluoro guanosine
  modified_base 7: mod_base = OTHER; note = 2'O-methyl uridine
  modified_base 8: mod_base = OTHER; note = 2'O-methyl guanosine
  modified_base 9: mod_base = OTHER; note = 2'O-methyl cytidine
  modified_base 10: mod_base = OTHER; note = 2'O-methyl uridine
  modified_base 11: mod_base = OTHER; note = 2'O-methyl uridine
  modified_base 12: mod_base = OTHER; note = 2'O-methyl uridine
  modified_base 13: mod_base = OTHER; note = 2'O-methyl uridine
  modified_base 14: mod_base = OTHER; note = 2'-fluoro guanosine
  modified_base 15: mod_base = OTHER; note = 2'O-methyl uridine
  modified_base 16: mod_base = OTHER; note = 2'-fluoro guanosine
  modified_base 17: mod_base = OTHER; note = 2'O-methyl adenosine
  modified_base 18: mod_base = OTHER; note = 2'O-methyl uridine
  modified_base 19: mod_base = OTHER; note = 2'O-methyl cytidine
  modified_base 20: mod_base = OTHER; note = 2'O-methyl cytidine
  modified_base 21: mod_base = OTHER; note = 2'O-methyl adenosine phosphorothioate
  modified_base 22: mod_base = OTHER; note = 2'O-methyl uridine phosphorothioate
  modified_base 23: mod_base = OTHER; note = 2'O-methyl uridine
aagaagtgcttttgtgatccatt

SEQ ID NO: 530 - RNA, 23 nt, synthetic construct
  source 1..23: mol_type = other RNA
  modified_base 1: mod_base = OTHER; note = 5' vinyl phosphonate 2'O-methyl adenosine phosphorothioate
  modified_base 2: mod_base = OTHER; note = 2'-fluoro adenosine phosphorothioate
  modified_base 3: mod_base = OTHER; note = 2'O-methyl adenosine
  modified_base 4: mod_base = OTHER; note = 2'O-methyl adenosine
  modified_base 5: mod_base = OTHER; note = 2'O-methyl cytidine
  modified_base 6: mod_base = OTHER; note = 2'-fluoro uridine
  modified_base 7: mod_base = OTHER; note = 2'O-methyl uridine
  modified_base 8: mod_base = OTHER; note = 2'O-methyl cytidine
  modified_base 9: mod_base = OTHER; note = 2'O-methyl adenosine
  modified_base 10: mod_base = OTHER; note = 2'O-methyl cytidine
  modified_base 11: mod_base = OTHER; note = 2'O-methyl cytidine
  modified_base 12: mod_base = OTHER; note = 2'O-methyl adenosine
  modified_base 13: mod_base = OTHER; note = 2'O-methyl adenosine
  modified_base 14: mod_base = OTHER; note = 2'-fluoro cytidine
  modified_base 15: mod_base = OTHER; note = 2'O-methyl guanosine
  modified_base 16: mod_base = OTHER; note = 2'-fluoro adenosine
  modified_base 17: mod_base = OTHER; note = 2'O-methyl cytidine
  modified_base 18: mod_base = OTHER; note = 2'O-methyl uridine
  modified_base 19: mod_base = OTHER; note = 2'O-methyl cytidine
  modified_base 20: mod_base = OTHER; note = 2'O-methyl cytidine
  modified_base 21: mod_base = OTHER; note = 2'O-methyl adenosine phosphorothioate
  modified_base 22: mod_base = OTHER; note = 2'O-methyl uridine phosphorothioate
  modified_base 23: mod_base = OTHER; note = 2'O-methyl uridine
aaaacttcaccaacgactccatt

SEQ ID NO: 531 - RNA, 23 nt, synthetic construct
  source 1..23: mol_type = other RNA
  modified_base 1: mod_base = OTHER; note = 5' vinyl phosphonate 2'O-methyl uridine phosphorothioate
  modified_base 2: mod_base = OTHER; note = 2'-fluoro adenosine phosphorothioate
  modified_base 3: mod_base = OTHER; note = 2'O-methyl adenosine
  modified_base 4: mod_base = OTHER; note = 2'O-methyl uridine
  modified_base 5: mod_base = OTHER; note = 2'O-methyl adenosine
  modified_base 6: mod_base = OTHER; note = 2'-fluoro uridine
  modified_base 7: mod_base = OTHER; note = 2'O-methyl cytidine
  modified_base 8: mod_base = OTHER; note = 2'O-methyl cytidine
  modified_base 9: mod_base = OTHER; note = 2'O-methyl cytidine
  modified_base 10: mod_base = OTHER; note = 2'O-methyl adenosine
  modified_base 11: mod_base = OTHER; note = 2'O-methyl cytidine
  modified_base 12: mod_base = OTHER; note = 2'O-methyl adenosine
  modified_base 13: mod_base = OTHER; note = 2'O-methyl guanosine
  modified_base 14: mod_base = OTHER; note = 2'-fluoro adenosine
  modified_base 15: mod_base = OTHER; note = 2'O-methyl adenosine
  modified_base 16: mod_base = OTHER; note = 2'-fluoro cytidine
  modified_base 17: mod_base = OTHER; note = 2'O-methyl cytidine
  modified_base 18: mod_base = OTHER; note = 2'O-methyl adenosine
  modified_base 19: mod_base = OTHER; note = 2'O-methyl adenosine
  modified_base 20: mod_base = OTHER; note = 2'O-methyl uridine
  modified_base 21: mod_base = OTHER; note = 2'O-methyl adenosine phosphorothioate
  modified_base 22: mod_base = OTHER; note = 2'O-methyl uridine phosphorothioate
  modified_base 23: mod_base = OTHER; note = 2'O-methyl uridine
taatatcccacagaaccaatatt

SEQ ID NO: 532 - RNA, 23 nt, synthetic construct
  source 1..23: mol_type = other RNA
  modified_base 1: mod_base = OTHER; note = 5' vinyl phosphonate 2'O-methyl uridine phosphorothioate
  modified_base 2: mod_base = OTHER; note = 2'-fluoro guanosine phosphorothioate
  modified_base 3: mod_base = OTHER; note = 2'O-methyl uridine
  modified_base 4: mod_base = OTHER; note = 2'O-methyl guanosine
  modified_base 5: mod_base = OTHER; note = 2'O-methyl adenosine
  modified_base 6: mod_base = OTHER; note = 2'-fluoro uridine
  modified_base 7: mod_base = OTHER; note = 2'O-methyl cytidine
  modified_base 8: mod_base = OTHER; note = 2'O-methyl cytidine
  modified_base 9: mod_base = OTHER; note = 2'O-methyl adenosine
  modified_base 10: mod_base = OTHER; note = 2'O-methyl adenosine
  modified_base 11: mod_base = OTHER; note = 2'O-methyl adenosine
  modified_base 12: mod_base = OTHER; note = 2'O-methyl adenosine
  modified_base 13: mod_base = OTHER; note = 2'O-methyl adenosine
  modified_base 14: mod_base = OTHER; note = 2'-fluoro uridine
  modified_base 15: mod_base = OTHER; note = 2'O-methyl guanosine
  modified_base 16: mod_base = OTHER; note = 2'-fluoro uridine
  modified_base 17: mod_base = OTHER; note = 2'O-methyl cytidine
  modified_base 18: mod_base = OTHER; note = 2'O-methyl cytidine
  modified_base 19: mod_base = OTHER; note = 2'O-methyl uridine
  modified_base 20: mod_base = OTHER; note = 2'O-methyl adenosine
  modified_base 21: mod_base = OTHER; note = 2'O-methyl guanosine phosphorothioate
  modified_base 22: mod_base = OTHER; note = 2'O-methyl uridine phosphorothioate
  modified_base 23: mod_base = OTHER; note = 2'O-methyl uridine
tgtgatccaaaaatgtcctagtt

SEQ ID NO: 533 - RNA, 23 nt, synthetic construct
  source 1..23: mol_type = other RNA
  modified_base 1: mod_base = OTHER; note = 5' vinyl phosphonate 2'O-methyl uridine phosphorothioate
  modified_base 2: mod_base = OTHER; note = 2'-fluoro uridine phosphorothioate
  modified_base 3: mod_base = OTHER; note = 2'O-methyl uridine
  modified_base 4: mod_base = OTHER; note = 2'O-methyl guanosine
  modified_base 5: mod_base = OTHER; note = 2'O-methyl adenosine
  modified_base 6: mod_base = OTHER; note = 2'-fluoro uridine
  modified_base 7: mod_base = OTHER; note = 2'O-methyl adenosine
  modified_base 8: mod_base = OTHER; note = 2'O-methyl cytidine
  modified_base 9: mod_base = OTHER; note = 2'O-methyl cytidine
  modified_base 10: mod_base = OTHER; note = 2'O-methyl adenosine
  modified_base 11: mod_base = OTHER; note = 2'O-methyl guanosine
  modified_base 12: mod_base = OTHER; note = 2'O-methyl uridine
  modified_base 13: mod_base = OTHER; note = 2'O-methyl uridine
  modified_base 14: mod_base = OTHER; note = 2'-fluoro uridine
  modified_base 15: mod_base = OTHER; note = 2'O-methyl uridine
  modified_base 16: mod_base = OTHER; note = 2'-fluoro uridine
  modified_base 17: mod_base = OTHER; note = 2'O-methyl cytidine
  modified_base 18: mod_base = OTHER; note = 2'O-methyl cytidine
  modified_base 19: mod_base = OTHER; note = 2'O-methyl cytidine
  modified_base 20: mod_base = OTHER; note = 2'O-methyl adenosine
  modified_base 21: mod_base = OTHER; note = 2'O-methyl adenosine phosphorothioate
  modified_base 22: mod_base = OTHER; note = 2'O-methyl uridine phosphorothioate
  modified_base 23: mod_base = OTHER; note = 2'O-methyl uridine
tttgataccagtttttcccaatt

SEQ ID NO: 534 - RNA, 23 nt, synthetic construct
  source 1..23: mol_type = other RNA
  modified_base 1: mod_base = OTHER; note = 5' vinyl phosphonate 2'O-methyl adenosine phosphorothioate
  modified_base 2: mod_base = OTHER; note = 2'-fluoro cytidine phosphorothioate
  modified_base 3: mod_base = OTHER; note = 2'O-methyl adenosine
  modified_base 4: mod_base = OTHER; note = 2'O-methyl adenosine
  modified_base 5: mod_base = OTHER; note = 2'O-methyl uridine
  modified_base 6: mod_base = OTHER; note = 2'-fluoro adenosine
  modified_base 7: mod_base = OTHER; note = 2'O-methyl uridine
  modified_base 8: mod_base = OTHER; note = 2'O-methyl guanosine
  modified_base 9: mod_base = OTHER; note = 2'O-methyl guanosine
  modified_base 10: mod_base = OTHER; note = 2'O-methyl guanosine
  modified_base 11: mod_base = OTHER; note = 2'O-methyl adenosine
  modified_base 12: mod_base = OTHER; note = 2'O-methyl uridine
  modified_base 13: mod_base = OTHER; note = 2'O-methyl guanosine
  modified_base 14: mod_base = OTHER; note = 2'-fluoro adenosine
  modified_base 15: mod_base = OTHER; note = 2'O-methyl guanosine
  modified_base 16: mod_base = OTHER; note = 2'-fluoro guanosine
  modified_base 17: mod_base = OTHER; note = 2'O-methyl uridine
  modified_base 18: mod_base = OTHER; note = 2'O-methyl adenosine
  modified_base 19: mod_base = OTHER; note = 2'O-methyl adenosine
  modified_base 20: mod_base = OTHER; note = 2'O-methyl guanosine
  modified_base 21: mod_base = OTHER; note = 2'O-methyl guanosine phosphorothioate
  modified_base 22: mod_base = OTHER; note = 2'O-methyl uridine phosphorothioate
  modified_base 23: mod_base = OTHER; note = 2'O-methyl uridine
acaatatgggatgaggtaaggtt

SEQ ID NO: 535 - RNA, 23 nt, synthetic construct
  source 1..23: mol_type = other RNA
  modified_base 1: mod_base = OTHER; note = 5' vinyl phosphonate 2'O-methyl adenosine phosphorothioate
  modified_base 2: mod_base = OTHER; note = 2'-fluoro adenosine phosphorothioate
  modified_base 3: mod_base = OTHER; note = 2'O-methyl uridine
  modified_base 4: mod_base = OTHER; note = 2'O-methyl uridine
  modified_base 5: mod_base = OTHER; note = 2'O-methyl uridine
  modified_base 6: mod_base = OTHER; note = 2'-fluoro guanosine
  modified_base 7: mod_base = OTHER; note = 2'O-methyl cytidine
  modified_base 8: mod_base = OTHER; note = 2'O-methyl uridine
  modified_base 9: mod_base = OTHER; note = 2'O-methyl guanosine
  modified_base 10: mod_base = OTHER; note = 2'O-methyl guanosine
  modified_base 11: mod_base = OTHER; note = 2'O-methyl adenosine
  modified_base 12: mod_base = OTHER; note = 2'O-methyl adenosine
  modified_base 13: mod_base = OTHER; note = 2'O-methyl cytidine
  modified_base 14: mod_base = OTHER; note = 2'-fluoro adenosine
  modified_base 15: mod_base = OTHER; note = 2'O-methyl adenosine
  modified_base 16: mod_base = OTHER; note = 2'-fluoro uridine
  modified_base 17: mod_base = OTHER; note = 2'O-methyl adenosine
  modified_base 18: mod_base = OTHER; note = 2'O-methyl uridine
  modified_base 19: mod_base = OTHER; note = 2'O-methyl guanosine
  modified_base 20: mod_base = OTHER; note = 2'O-methyl guanosine
  modified_base 21: mod_base = OTHER; note = 2'O-methyl guanosine phosphorothioate
  modified_base 22: mod_base = OTHER; note = 2'O-methyl uridine phosphorothioate
  modified_base 23: mod_base = OTHER; note = 2'O-methyl uridine
aatttgctggaacaatatgggtt

SEQ ID NO: 536 - RNA, 23 nt, synthetic construct
  source 1..23: mol_type = other RNA
  modified_base 1: mod_base = OTHER; note = 5' vinyl phosphonate 2'O-methyl uridine phosphorothioate
  modified_base 2: mod_base = OTHER; note = 2'-fluoro guanosine phosphorothioate
  modified_base 3: mod_base = OTHER; note = 2'O-methyl adenosine
  modified_base 4: mod_base = OTHER; note = 2'O-methyl uridine
  modified_base 5: mod_base = OTHER; note = 2'O-methyl adenosine
  modified_base 6: mod_base = OTHER; note = 2'-fluoro cytidine
  modified_base 7: mod_base = OTHER; note = 2'O-methyl cytidine
  modified_base 8: mod_base = OTHER; note = 2'O-methyl adenosine
  modified_base 9: mod_base = OTHER; note = 2'O-methyl guanosine
  modified_base 10: mod_base = OTHER; note = 2'O-methyl uridine
  modified_base 11: mod_base = OTHER; note = 2'O-methyl uridine
  modified_base 12: mod_base = OTHER; note = 2'O-methyl uridine
  modified_base 13: mod_base = OTHER; note = 2'O-methyl uridine
  modified_base 14: mod_base = OTHER; note = 2'-fluoro uridine
  modified_base 15: mod_base = OTHER; note = 2'O-methyl cytidine
  modified_base 16: mod_base = OTHER; note = 2'-fluoro cytidine
  modified_base 17: mod_base = OTHER; note = 2'O-methyl cytidine
  modified_base 18: mod_base = OTHER; note = 2'O-methyl adenosine
  modified_base 19: mod_base = OTHER; note = 2'O-methyl adenosine
  modified_base 20: mod_base = OTHER; note = 2'O-methyl guanosine
  modified_base 21: mod_base = OTHER; note = 2'O-methyl guanosine phosphorothioate
  modified_base 22: mod_base = OTHER; note = 2'O-methyl uridine phosphorothioate
  modified_base 23: mod_base = OTHER; note = 2'O-methyl uridine
tgataccagtttttcccaaggtt

SEQ ID NO: 537 - RNA, 23 nt, synthetic construct
  source 1..23: mol_type = other RNA
  modified_base 1: mod_base = OTHER; note = 5' vinyl phosphonate 2'O-methyl adenosine phosphorothioate
  modified_base 2: mod_base = OTHER; note = 2'-fluoro guanosine phosphorothioate
  modified_base 3: mod_base = OTHER; note = 2'O-methyl adenosine
  modified_base 4: mod_base = OTHER; note = 2'O-methyl cytidine
  modified_base 5: mod_base = OTHER; note = 2'O-methyl adenosine
  modified_base 6: mod_base = OTHER; note = 2'-fluoro uridine
  modified_base 7: mod_base = OTHER; note = 2'O-methyl guanosine
  modified_base 8: mod_base = OTHER; note = 2'O-methyl adenosine
  modified_base 9: mod_base = OTHER; note = 2'O-methyl guanosine
  modified_base 10: mod_base = OTHER; note = 2'O-methyl guanosine
  modified_base 11: mod_base = OTHER; note = 2'O-methyl uridine
  modified_base 12: mod_base = OTHER; note = 2'O-methyl uridine
  modified_base 13: mod_base = OTHER; note = 2'O-methyl uridine
  modified_base 14: mod_base = OTHER; note = 2'-fluoro uridine
  modified_base 15: mod_base = OTHER; note = 2'O-methyl guanosine
  modified_base 16: mod_base = OTHER; note = 2'-fluoro adenosine
  modified_base 17: mod_base = OTHER; note = 2'O-methyl uridine
  modified_base 18: mod_base = OTHER; note = 2'O-methyl adenosine
  modified_base 19: mod_base = OTHER; note = 2'O-methyl cytidine
  modified_base 20: mod_base = OTHER; note = 2'O-methyl cytidine
  modified_base 21: mod_base = OTHER; note = 2'O-methyl adenosine phosphorothioate
  modified_base 22: mod_base = OTHER; note = 2'O-methyl uridine phosphorothioate
  modified_base 23: mod_base = OTHER; note = 2'O-methyl uridine
agacatgaggttttgataccatt

SEQ ID NO: 538 - RNA, 23 nt, synthetic construct
  source 1..23: mol_type = other RNA
  modified_base 1: mod_base = OTHER; note = 5' vinyl phosphonate 2'O-methyl adenosine phosphorothioate
  modified_base 2: mod_base = OTHER; note = 2'-fluoro guanosine phosphorothioate
  modified_base 3: mod_base = OTHER; note = 2'O-methyl adenosine
  modified_base 4: mod_base = OTHER; note = 2'O-methyl guanosine
  modified_base 5: mod_base = OTHER; note = 2'O-methyl adenosine
  modified_base 6: mod_base = OTHER; note = 2'-fluoro cytidine
  modified_base 7: mod_base = OTHER; note = 2'O-methyl adenosine
  modified_base 8: mod_base = OTHER; note = 2'O-methyl uridine
  modified_base 9: mod_base = OTHER; note = 2'O-methyl guanosine
  modified_base 10: mod_base = OTHER; note = 2'O-methyl adenosine
  modified_base 11: mod_base = OTHER; note = 2'O-methyl guanosine
  modified_base 12: mod_base = OTHER; note = 2'O-methyl guanosine
  modified_base 13: mod_base = OTHER; note = 2'O-methyl uridine
  modified_base 14: mod_base = OTHER; note = 2'-fluoro uridine
  modified_base 15: mod_base = OTHER; note = 2'O-methyl uridine
  modified_base 16: mod_base = OTHER; note = 2'-fluoro uridine
  modified_base 17: mod_base = OTHER; note = 2'O-methyl guanosine
  modified_base 18: mod_base = OTHER; note = 2'O-methyl adenosine
  modified_base 19: mod_base = OTHER; note = 2'O-methyl uridine
  modified_base 20: mod_base = OTHER; note = 2'O-methyl adenosine
  modified_base 21: mod_base = OTHER; note = 2'O-methyl cytidine phosphorothioate
  modified_base 22: mod_base = OTHER; note = 2'O-methyl uridine phosphorothioate
  modified_base 23: mod_base = OTHER; note = 2'O-methyl uridine
agagacatgaggttttgatactt

SEQ ID NO: 539 - RNA, 23 nt, synthetic construct
  source 1..23: mol_type = other RNA
  modified_base 1: mod_base = OTHER; note = 5' vinyl phosphonate 2'O-methyl uridine phosphorothioate
  modified_base 2: mod_base = OTHER; note = 2'-fluoro guanosine phosphorothioate
  modified_base 3: mod_base = OTHER; note = 2'O-methyl guanosine
  modified_base 4: mod_base = OTHER; note = 2'O-methyl uridine
  modified_base 5: mod_base = OTHER; note = 2'O-methyl guanosine
  modified_base 6: mod_base = OTHER; note = 2'-fluoro adenosine
  modified_base 7: mod_base = OTHER; note = 2'O-methyl adenosine
  modified_base 8: mod_base = OTHER; note = 2'O-methyl cytidine
  modified_base 9: mod_base = OTHER; note = 2'O-methyl cytidine
  modified_base 10: mod_base = OTHER; note = 2'O-methyl cytidine
  modified_base 11: mod_base = OTHER; note = 2'O-methyl adenosine
  modified_base 12: mod_base = OTHER; note = 2'O-methyl guanosine
  modified_base 13: mod_base = OTHER; note = 2'O-methyl uridine
  modified_base 14: mod_base = OTHER; note = 2'-fluoro adenosine
  modified_base 15: mod_base = OTHER; note = 2'O-methyl uridine
  modified_base 16: mod_base = OTHER; note = 2'-fluoro uridine
  modified_base 17: mod_base = OTHER; note = 2'O-methyl cytidine
  modified_base 18: mod_base = OTHER; note = 2'O-methyl adenosine
  modified_base 19: mod_base = OTHER; note = 2'O-methyl cytidine
  modified_base 20: mod_base = OTHER; note = 2'O-methyl adenosine
  modified_base 21: mod_base = OTHER; note = 2'O-methyl adenosine phosphorothioate
  modified_base 22: mod_base = OTHER; note = 2'O-methyl uridine phosphorothioate
  modified_base 23: mod_base = OTHER; note = 2'O-methyl uridine
tggtgaacccagtattcacaatt

SEQ ID NO: 540 - RNA, 23 nt, synthetic construct
  source 1..23: mol_type = other RNA
  modified_base 1: mod_base = OTHER; note = 5' vinyl phosphonate 2'O-methyl uridine phosphorothioate
  modified_base 2: mod_base = OTHER; note = 2'-fluoro uridine phosphorothioate
  modified_base 3: mod_base = OTHER; note = 2'O-methyl guanosine
  modified_base 4: mod_base = OTHER; note = 2'O-methyl guanosine
  modified_base 5: mod_base = OTHER; note = 2'O-methyl uridine
  modified_base 6: mod_base = OTHER; note = 2'-fluoro guanosine
  modified_base 7: mod_base = OTHER; note = 2'O-methyl adenosine
  modified_base 8: mod_base = OTHER; note = 2'O-methyl adenosine
  modified_base 9: mod_base = OTHER; note = 2'O-methyl cytidine
  modified_base 10: mod_base = OTHER; note = 2'O-methyl cytidine
  modified_base 11: mod_base = OTHER; note = 2'O-methyl cytidine
  modified_base 12: mod_base = OTHER; note = 2'O-methyl adenosine
  modified_base 13: mod_base = OTHER; note = 2'O-methyl guanosine
  modified_base 14: mod_base = OTHER; note = 2'-fluoro uridine
  modified_base 15: mod_base = OTHER; note = 2'O-methyl adenosine
  modified_base 16: mod_base = OTHER; note = 2'-fluoro uridine
  modified_base 17: mod_base = OTHER; note = 2'O-methyl uridine
  modified_base 18: mod_base = OTHER; note = 2'O-methyl cytidine
  modified_base 19: mod_base = OTHER; note = 2'O-methyl adenosine
  modified_base 20: mod_base = OTHER; note = 2'O-methyl cytidine
  modified_base 21: mod_base = OTHER; note = 2'O-methyl adenosine phosphorothioate
  modified_base 22: mod_base = OTHER; note = 2'O-methyl uridine phosphorothioate
  modified_base 23: mod_base = OTHER; note = 2'O-methyl uridine
ttggtgaacccagtattcacatt

SEQ ID NO: 541 - RNA, 23 nt, synthetic construct
  source 1..23: mol_type = other RNA
  modified_base 1: mod_base = OTHER; note = 5' vinyl phosphonate 2'O-methyl uridine phosphorothioate
  modified_base 2: mod_base = OTHER; note = 2'-fluoro uridine phosphorothioate
  modified_base 3: mod_base = OTHER; note = 2'O-methyl uridine
  modified_base 4: mod_base = OTHER; note = 2'O-methyl guanosine
  modified_base 5: mod_base = OTHER; note = 2'O-methyl guanosine
  modified_base 6: mod_base = OTHER; note = 2'-fluoro uridine
  modified_base 7: mod_base = OTHER; note = 2'O-methyl guanosine
  modified_base 8: mod_base = OTHER; note = 2'O-methyl adenosine
  modified_base 9: mod_base = OTHER; note = 2'O-methyl adenosine
  modified_base 10: mod_base = OTHER; note = 2'O-methyl cytidine
  modified_base 11: mod_base = OTHER; note = 2'O-methyl cytidine
  modified_base 12: mod_base = OTHER; note = 2'O-methyl cytidine
  modified_base 13: mod_base = OTHER; note = 2'O-methyl adenosine
  modified_base 14: mod_base = OTHER; note = 2'-fluoro guanosine
  modified_base 15: mod_base = OTHER; note = 2'O-methyl uridine
  modified_base 16: mod_base = OTHER; note = 2'-fluoro adenosine
  modified_base 17: mod_base = OTHER; note = 2'O-methyl uridine
  modified_base 18: mod_base = OTHER; note = 2'O-methyl uridine
  modified_base 19: mod_base = OTHER; note = 2'O-methyl cytidine
  modified_base 20: mod_base = OTHER; note = 2'O-methyl adenosine
  modified_base 21: mod_base = OTHER; note = 2'O-methyl cytidine phosphorothioate
  modified_base 22: mod_base = OTHER; note = 2'O-methyl uridine phosphorothioate
  modified_base 23: mod_base = OTHER; note = 2'O-methyl uridine
tttggtgaacccagtattcactt

SEQ ID NO: 542 - RNA, 23 nt, synthetic construct
  source 1..23: mol_type = other RNA
  modified_base 1: mod_base = OTHER; note = 5' vinyl phosphonate 2'O-methyl uridine phosphorothioate
  modified_base 2: mod_base = OTHER; note = 2'-fluoro uridine phosphorothioate
  modified_base 3: mod_base = OTHER; note = 2'O-methyl uridine
  modified_base 4: mod_base = OTHER; note = 2'O-methyl uridine
  modified_base 5: mod_base = OTHER; note = 2'O-methyl guanosine
  modified_base 6: mod_base = OTHER; note = 2'-fluoro guanosine
  modified_base 7: mod_base = OTHER; note = 2'O-methyl uridine
  modified_base 8: mod_base = OTHER; note = 2'O-methyl guanosine
  modified_base 9: mod_base = OTHER; note = 2'O-methyl adenosine
  modified_base 10: mod_base = OTHER; note = 2'O-methyl adenosine
  modified_base 11: mod_base = OTHER; note = 2'O-methyl cytidine
  modified_base 12: mod_base = OTHER; note = 2'O-methyl cytidine
  modified_base 13: mod_base = OTHER; note = 2'O-methyl cytidine
  modified_base 14: mod_base = OTHER; note = 2'-fluoro adenosine
  modified_base 15: mod_base = OTHER; note = 2'O-methyl guanosine
  modified_base 16: mod_base = OTHER; note = 2'-fluoro uridine
  modified_base 17: mod_base = OTHER; note = 2'O-methyl adenosine
  modified_base 18: mod_base = OTHER; note = 2'O-methyl uridine
  modified_base 19: mod_base = OTHER; note = 2'O-methyl uridine
  modified_base 20: mod_base = OTHER; note = 2'O-methyl cytidine
  modified_base 21: mod_base = OTHER; note = 2'O-methyl adenosine phosphorothioate
  modified_base 22: mod_base = OTHER; note = 2'O-methyl uridine phosphorothioate
  modified_base 23: mod_base = OTHER; note = 2'O-methyl uridine
ttttggtgaacccagtattcatt

SEQ ID NO: 543 - RNA, 23 nt, synthetic construct
  source 1..23: mol_type = other RNA
  modified_base 1: mod_base = OTHER; note = 5' vinyl phosphonate 2'O-methyl adenosine phosphorothioate
  modified_base 2: mod_base = OTHER; note = 2'-fluoro uridine phosphorothioate
  modified_base 3: mod_base = OTHER; note = 2'O-methyl cytidine
  modified_base 4: mod_base = OTHER; note = 2'O-methyl uridine
  modified_base 5: mod_base = OTHER; note = 2'O-methyl uridine
  modified_base 6: mod_base = OTHER; note = 2'-fluoro guanosine
  modified_base 7: mod_base = OTHER; note = 2'O-methyl uridine
  modified_base 8: mod_base = OTHER; note = 2'O-methyl guanosine
  modified_base 9: mod_base = OTHER; note = 2'O-methyl cytidine
  modified_base 10: mod_base = OTHER; note = 2'O-methyl uridine
  modified_base 11: mod_base = OTHER; note = 2'O-methyl uridine
  modified_base 12: mod_base = OTHER; note = 2'O-methyl guanosine
  modified_base 13: mod_base = OTHER; note = 2'O-methyl guanosine
  modified_base 14: mod_base = OTHER; note = 2'-fluoro adenosine
  modified_base 15: mod_base = OTHER; note = 2'O-methyl uridine
  modified_base 16: mod_base = OTHER; note = 2'-fluoro uridine
  modified_base 17: mod_base = OTHER; note = 2'O-methyl uridine
  modified_base 18: mod_base = OTHER; note = 2'O-methyl uridine
  modified_base 19: mod_base = OTHER; note = 2'O-methyl uridine
  modified_base 20: mod_base = OTHER; note = 2'O-methyl guanosine
  modified_base 21: mod_base = OTHER; note = 2'O-methyl guanosine phosphorothioate
  modified_base 22: mod_base = OTHER; note = 2'O-methyl uridine phosphorothioate
  modified_base 23: mod_base = OTHER; note = 2'O-methyl uridine
atcttgtgcttggatttttggtt

SEQ ID NO: 544 - RNA, 23 nt, synthetic construct
  source 1..23: mol_type = other RNA
  modified_base 1: mod_base = OTHER; note = 5' vinyl phosphonate 2'O-methyl uridine phosphorothioate
  modified_base 2: mod_base = OTHER; note = 2'-fluoro uridine phosphorothioate
  modified_base 3: mod_base = OTHER; note = 2'O-methyl uridine
  modified_base 4: mod_base = OTHER; note = 2'O-methyl cytidine
  modified_base 5: mod_base = OTHER; note = 2'O-methyl uridine
  modified_base 6: mod_base = OTHER; note = 2'-fluoro uridine
  modified_base 7: mod_base = OTHER; note = 2'O-methyl adenosine
  modified_base 8: mod_base = OTHER; note = 2'O-methyl uridine
  modified_base 9: mod_base = OTHER; note = 2'O-methyl uridine
  modified_base 10: mod_base = OTHER; note = 2'O-methyl guanosine
  modified_base 11: mod_base = OTHER; note = 2'O-methyl guanosine
  modified_base 12: mod_base = OTHER; note = 2'O-methyl uridine
  modified_base 13: mod_base = OTHER; note = 2'O-methyl adenosine
  modified_base 14: mod_base = OTHER; note = 2'-fluoro adenosine
  modified_base 15: mod_base = OTHER; note = 2'O-methyl guanosine
  modified_base 16: mod_base = OTHER; note = 2'-fluoro uridine
  modified_base 17: mod_base = OTHER; note = 2'O-methyl adenosine
  modified_base 18: mod_base = OTHER; note = 2'O-methyl uridine
  modified_base 19: mod_base = OTHER; note = 2'O-methyl uridine
  modified_base 20: mod_base = OTHER; note = 2'O-methyl cytidine
  modified_base 21: mod_base = OTHER; note = 2'O-methyl cytidine phosphorothioate
  modified_base 22: mod_base = OTHER; note = 2'O-methyl uridine phosphorothioate
  modified_base 23: mod_base = OTHER; note = 2'O-methyl uridine
tttcttattggtaagtattcctt

SEQ ID NO: 545 - RNA, 23 nt, synthetic construct
  source 1..23: mol_type = other RNA
  modified_base 1: mod_base = OTHER; note = 5' vinyl phosphonate 2'O-methyl uridine phosphorothioate
  modified_base 2: mod_base = OTHER; note = 2'-fluoro uridine phosphorothioate
  modified_base 3: mod_base = OTHER; note = 2'O-methyl guanosine
  modified_base 4: mod_base = OTHER; note = 2'O-methyl uridine
  modified_base 5: mod_base = OTHER; note = 2'O-methyl guanosine
  modified_base 6: mod_base = OTHER; note = 2'-fluoro adenosine
  modified_base 7: mod_base = OTHER; note = 2'O-methyl uridine
  modified_base 8: mod_base = OTHER; note = 2'O-methyl cytidine
  modified_base 9: mod_base = OTHER; note = 2'O-methyl cytidine
  modified_base 10: mod_base = OTHER; note = 2'O-methyl adenosine
  modified_base 11: mod_base = OTHER; note = 2'O-methyl adenosine
  modified_base 12: mod_base = OTHER; note = 2'O-methyl adenosine
  modified_base 13: mod_base = OTHER; note = 2'O-methyl adenosine
  modified_base 14: mod_base = OTHER; note = 2'-fluoro adenosine
  modified_base 15: mod_base = OTHER; note = 2'O-methyl uridine
  modified_base 16: mod_base = OTHER; note = 2'-fluoro guanosine
  modified_base 17: mod_base = OTHER; note = 2'O-methyl uridine
  modified_base 18: mod_base = OTHER; note = 2'O-methyl cytidine
  modified_base 19: mod_base = OTHER; note = 2'O-methyl cytidine
  modified_base 20: mod_base = OTHER; note = 2'O-methyl uridine
  modified_base 21: mod_base = OTHER; note = 2'O-methyl adenosine phosphorothioate
  modified_base 22: mod_base = OTHER; note = 2'O-methyl uridine phosphorothioate
  modified_base 23: mod_base = OTHER; note = 2'O-methyl uridine
ttgtgatccaaaaatgtcctatt

SEQ ID NO: 546 - RNA, 23 nt, synthetic construct
  source 1..23: mol_type = other RNA
  modified_base 1: mod_base = OTHER; note = 2'O-methyl adenosine phosphorothioate
  modified_base 2: mod_base = OTHER; note = 2'-fluoro adenosine phosphorothioate
  modified_base 3: mod_base = OTHER; note = 2'O-methyl cytidine
  modified_base 4: mod_base = OTHER; note = 2'O-methyl uridine
  modified_base 5: mod_base = OTHER; note = 2'O-methyl uridine
  modified_base 6: mod_base = OTHER; note = 2'-fluoro cytidine
  modified_base 7: mod_base = OTHER; note = 2'O-methyl adenosine
  modified_base 8: mod_base = OTHER; note = 2'O-methyl cytidine
  modified_base 9: mod_base = OTHER; note = 2'O-methyl cytidine
  modified_base 10: mod_base = OTHER; note = 2'O-methyl adenosine
  modified_base 11: mod_base = OTHER; note = 2'O-methyl adenosine
  modified_base 12: mod_base = OTHER; note = 2'O-methyl cytidine
  modified_base 13: mod_base = OTHER; note = 2'O-methyl guanosine
  modified_base 14: mod_base = OTHER; note = 2'-fluoro adenosine
  modified_base 15: mod_base = OTHER; note = 2'O-methyl cytidine
  modified_base 16: mod_base = OTHER; note = 2'-fluoro uridine
  modified_base 17: mod_base = OTHER; note = 2'O-methyl cytidine
  modified_base 18: mod_base = OTHER; note = 2'O-methyl cytidine
  modified_base 19: mod_base = OTHER; note = 2'O-methyl adenosine
  modified_base 20: mod_base = OTHER; note = 2'O-methyl adenosine
  modified_base 21: mod_base = OTHER; note = 2'O-methyl guanosine phosphorothioate
  modified_base 22: mod_base = OTHER; note = 2'O-methyl uridine phosphorothioate
  modified_base 23: mod_base = OTHER; note = 2'O-methyl uridine
aacttcaccaacgactccaagtt

SEQ ID NO: 547 - RNA, 23 nt, synthetic construct
  source 1..23: mol_type = other RNA
  modified_base 1: mod_base = OTHER; note = 2'O-methyl adenosine phosphorothioate
  modified_base 2: mod_base = OTHER; note = 2'-fluoro adenosine phosphorothioate
  modified_base 3: mod_base = OTHER; note = 2'O-methyl adenosine
  modified_base 4: mod_base = OTHER; note = 2'O-methyl adenosine
  modified_base 5: mod_base = OTHER; note = 2'O-methyl cytidine
  modified_base 6: mod_base = OTHER; note = 2'-fluoro uridine
  modified_base 7: mod_base = OTHER; note = 2'O-methyl uridine
  modified_base 8: mod_base = OTHER; note = 2'O-methyl cytidine
  modified_base 9: mod_base = OTHER; note = 2'O-methyl adenosine
  modified_base 10: mod_base = OTHER; note = 2'O-methyl cytidine
  modified_base 11: mod_base = OTHER; note = 2'O-methyl cytidine
  modified_base 12: mod_base = OTHER; note = 2'O-methyl adenosine
  modified_base 13: mod_base = OTHER; note = 2'O-methyl adenosine
  modified_base 14: mod_base = OTHER; note = 2'-fluoro cytidine
  modified_base 15: mod_base = OTHER; note = 2'O-methyl guanosine
  modified_base 16: mod_base = OTHER; note = 2'-fluoro adenosine
  modified_base 17: mod_base = OTHER; note = 2'O-methyl cytidine
  modified_base 18: mod_base = OTHER; note = 2'O-methyl uridine
  modified_base 19: mod_base = OTHER; note = 2'O-methyl cytidine
  modified_base 20: mod_base = OTHER; note = 2'O-methyl cytidine
  modified_base 21: mod_base = OTHER; note = 2'O-methyl adenosine phosphorothioate
  modified_base 22: mod_base = OTHER; note = 2'O-methyl uridine phosphorothioate
  modified_base 23: mod_base = OTHER; note = 2'O-methyl uridine
aaaacttcaccaacgactccatt

SEQ ID NO: 548 - RNA, 23 nt, synthetic construct
  source 1..23: mol_type = other RNA
  modified_base 1: mod_base = OTHER; note = 2'O-methyl adenosine phosphorothioate
  modified_base 2: mod_base = OTHER; note = 2'-fluoro guanosine phosphorothioate
  modified_base 3: mod_base = OTHER; note = 2'O-methyl guanosine
  modified_base 4: mod_base = OTHER; note = 2'O-methyl adenosine
  modified_base 5: mod_base = OTHER; note = 2'O-methyl adenosine
  modified_base 6: mod_base = OTHER; note = 2'-fluoro uridine
  modified_base 7: mod_base = OTHER; note = 2'O-methyl guanosine
  modified_base 8: mod_base = OTHER; note = 2'O-methyl adenosine
  modified_base 9: mod_base = OTHER; note = 2'O-methyl adenosine
  modified_base 10: mod_base = OTHER; note = 2'O-methyl adenosine
  modified_base 11: mod_base = OTHER; note = 2'O-methyl adenosine
  modified_base 12: mod_base = OTHER; note = 2'O-methyl adenosine
  modified_base 13: mod_base = OTHER; note = 2'O-methyl cytidine
  modified_base 14: mod_base = OTHER; note = 2'-fluoro uridine
  modified_base 15: mod_base = OTHER; note = 2'O-methyl uridine
  modified_base 16: mod_base = OTHER; note = 2'-fluoro cytidine
  modified_base 17: mod_base = OTHER; note = 2'O-methyl adenosine
  modified_base 18: mod_base = OTHER; note = 2'O-methyl cytidine
  modified_base 19: mod_base = OTHER; note = 2'O-methyl cytidine
  modified_base 20: mod_base = OTHER; note = 2'O-methyl adenosine
  modified_base 21: mod_base = OTHER; note = 2'O-methyl adenosine phosphorothioate
  modified_base 22: mod_base = OTHER; note = 2'O-methyl uridine phosphorothioate
  modified_base 23: mod_base = OTHER; note = 2'O-methyl uridine
aggaatgaaaaacttcaccaatt

SEQ ID NO: 549 - RNA, 23 nt, synthetic construct
  source 1..23: mol_type = other RNA
  modified_base 1: mod_base = OTHER; note = 2'O-methyl uridine phosphorothioate
  modified_base 2: mod_base = OTHER; note = 2'-fluoro guanosine phosphorothioate
  modified_base 3: mod_base = OTHER; note = 2'O-methyl adenosine
  modified_base 4: mod_base = OTHER; note = 2'O-methyl guanosine
  modified_base 5: mod_base = OTHER; note = 2'O-methyl guanosine
  modified_base 6: mod_base = OTHER; note = 2'-fluoro adenosine
  modified_base 7: mod_base = OTHER; note = 2'O-methyl adenosine
  modified_base 8: mod_base = OTHER; note = 2'O-methyl uridine
  modified_base 9: mod_base = OTHER; note = 2'O-methyl guanosine
  modified_base 10: mod_base = OTHER; note = 2'O-methyl adenosine
  modified_base 11: mod_base = OTHER; note = 2'O-methyl adenosine
  modified_base 12: mod_base = OTHER; note = 2'O-methyl adenosine
  modified_base 13: mod_base = OTHER; note = 2'O-methyl adenosine
  modified_base 14: mod_base = OTHER; note = 2'-fluoro adenosine
  modified_base 15: mod_base = OTHER; note = 2'O-methyl cytidine
  modified_base 16: mod_base = OTHER; note = 2'-fluoro uridine
  modified_base 17: mod_base = OTHER; note = 2'O-methyl uridine
  modified_base 18: mod_base = OTHER; note = 2'O-methyl cytidine
  modified_base 19: mod_base = OTHER; note = 2'O-methyl adenosine
  modified_base 20: mod_base = OTHER; note = 2'O-methyl cytidine
  modified_base 21: mod_base = OTHER; note = 2'O-methyl cytidine phosphorothioate
  modified_base 22: mod_base = OTHER; note = 2'O-methyl uridine phosphorothioate
  modified_base 23: mod_base = OTHER; note = 2'O-methyl uridine
tgaggaatgaaaaacttcacctt

SEQ ID NO: 550 - RNA, 23 nt, synthetic construct
  source 1..23: mol_type = other RNA
  modified_base 1: mod_base = OTHER; note = 2'O-methyl uridine phosphorothioate
  modified_base 2: mod_base = OTHER; note = 2'-fluoro uridine phosphorothioate
  modified_base 3: mod_base = OTHER; note = 2'O-methyl cytidine
  modified_base 4: mod_base = OTHER; note = 2'O-methyl adenosine
  modified_base 5: mod_base = OTHER; note = 2'O-methyl uridine
  modified_base 6: mod_base = OTHER; note = 2'-fluoro adenosine
  modified_base 7: mod_base = OTHER; note = 2'O-methyl adenosine
  modified_base 8: mod_base = OTHER; note = 2'O-methyl guanosine
  modified_base 9: mod_base = OTHER; note = 2'O-methyl uridine
  modified_base 10: mod_base = OTHER; note = 2'O-methyl adenosine
  modified_base 11: mod_base = OTHER; note = 2'O-methyl guanosine
  modified_base 12: mod_base = OTHER; note = 2'O-methyl uridine
  modified_base 13: mod_base = OTHER; note = 2'O-methyl cytidine
  modified_base 14: mod_base = OTHER; note = 2'-fluoro uridine
  modified_base 15: mod_base = OTHER; note = 2'O-methyl guanosine
  modified_base 16: mod_base = OTHER; note = 2'-fluoro cytidine
  modified_base 17: mod_base = OTHER; note = 2'O-methyl cytidine
  modified_base 18: mod_base = OTHER; note = 2'O-methyl uridine
  modified_base 19: mod_base = OTHER; note = 2'O-methyl guanosine
  modified_base 20: mod_base = OTHER; note = 2'O-methyl cytidine
  modified_base 21: mod_base = OTHER; note = 2'O-methyl cytidine phosphorothioate
  modified_base 22: mod_base = OTHER; note = 2'O-methyl uridine phosphorothioate
  modified_base 23: mod_base = OTHER; note = 2'O-methyl uridine
ttcataagtagtctgcctgcctt

SEQ ID NO: 551 - RNA, 23 nt, synthetic construct
  source 1..23: mol_type = other RNA
  modified_base 1: mod_base = OTHER; note = 2'O-methyl uridine phosphorothioate
  modified_base 2: mod_base = OTHER; note = 2'-fluoro adenosine phosphorothioate
  modified_base 3: mod_base = OTHER; note = 2'O-methyl adenosine
  modified_base 4: mod_base = OTHER; note = 2'O-methyl uridine
  modified_base 5: mod_base = OTHER; note = 2'O-methyl adenosine
  modified_base 6: mod_base = OTHER; note = 2'-fluoro uridine
  modified_base 7: mod_base = OTHER; note = 2'O-methyl cytidine
  modified_base 8: mod_base = OTHER; note = 2'O-methyl cytidine
  modified_base 9: mod_base = OTHER; note = 2'O-methyl cytidine
  modified_base 10: mod_base = OTHER; note = 2'O-methyl adenosine
  modified_base 11: mod_base = OTHER; note = 2'O-methyl cytidine
  modified_base 12: mod_base = OTHER; note = 2'O-methyl adenosine
  modified_base 13: mod_base = OTHER; note = 2'O-methyl guanosine
  modified_base 14: mod_base = OTHER; note = 2'-fluoro adenosine
  modified_base 15: mod_base = OTHER; note = 2'O-methyl adenosine
  modified_base 16: mod_base = OTHER; note = 2'-fluoro cytidine
  modified_base 17: mod_base = OTHER; note = 2'O-methyl cytidine
  modified_base 18: mod_base = OTHER; note = 2'O-methyl adenosine
  modified_base 19: mod_base = OTHER; note = 2'O-methyl adenosine
  modified_base 20: mod_base = OTHER; note = 2'O-methyl uridine
  modified_base 21: mod_base = OTHER; note = 2'O-methyl adenosine phosphorothioate
  modified_base 22: mod_base = OTHER; note = 2'O-methyl uridine phosphorothioate
  modified_base 23: mod_base = OTHER; note = 2'O-methyl uridine
taatatcccacagaaccaatatt

SEQ ID NO: 552 - RNA, 23 nt, synthetic construct
  source 1..23: mol_type = other RNA
  modified_base 1: mod_base = OTHER; note = 2'O-methyl uridine phosphorothioate
  modified_base 2: mod_base = OTHER; note = 2'-fluoro uridine phosphorothioate
  modified_base 3: mod_base = OTHER; note = 2'O-methyl adenosine
  modified_base 4: mod_base = OTHER; note = 2'O-methyl uridine
  modified_base 5: mod_base = OTHER; note = 2'O-methyl uridine
  modified_base 6: mod_base = OTHER; note = 2'-fluoro adenosine
  modified_base 7: mod_base = OTHER; note = 2'O-methyl adenosine
  modified_base 8: mod_base = OTHER; note = 2'O-methyl uridine
  modified_base 9: mod_base = OTHER; note = 2'O-methyl adenosine
  modified_base 10: mod_base = OTHER; note = 2'O-methyl uridine
  modified_base 11: mod_base = OTHER; note = 2'O-methyl cytidine
  modified_base 12: mod_base = OTHER; note = 2'O-methyl cytidine
  modified_base 13: mod_base = OTHER; note = 2'O-methyl cytidine
  modified_base 14: mod_base = OTHER; note = 2'-fluoro adenosine
  modified_base 15: mod_base = OTHER; note = 2'O-methyl cytidine
  modified_base 16: mod_base = OTHER; note = 2'-fluoro adenosine
  modified_base 17: mod_base = OTHER; note = 2'O-methyl guanosine
  modified_base 18: mod_base = OTHER; note = 2'O-methyl adenosine
  modified_base 19: mod_base = OTHER; note = 2'O-methyl adenosine
  modified_base 20: mod_base = OTHER; note = 2'O-methyl cytidine
  modified_base 21: mod_base = OTHER; note = 2'O-methyl cytidine phosphorothioate
  modified_base 22: mod_base = OTHER; note = 2'O-methyl uridine phosphorothioate
  modified_base 23: mod_base = OTHER; note = 2'O-methyl uridine
ttattaatatcccacagaacctt

SEQ ID NO: 553 - RNA, 23 nt, synthetic construct
  source 1..23: mol_type = other RNA
  modified_base 1: mod_base = OTHER; note = 2'O-methyl uridine phosphorothioate
  modified_base 2: mod_base = OTHER; note = 2'-fluoro guanosine phosphorothioate
  modified_base 3: mod_base = OTHER; note = 2'O-methyl guanosine
  modified_base 4: mod_base = OTHER; note = 2'O-methyl uridine
  modified_base 5: mod_base = OTHER; note = 2'O-methyl adenosine
  modified_base 6: mod_base = OTHER; note = 2'-fluoro adenosine
  modified_base 7: mod_base = OTHER; note = 2'O-methyl uridine
  modified_base 8: mod_base = OTHER; note = 2'O-methyl cytidine
  modified_base 9: mod_base = OTHER; note = 2'O-methyl uridine
  modified_base 10: mod_base = OTHER; note = 2'O-methyl cytidine
  modified_base 11: mod_base = OTHER; note = 2'O-methyl uridine
  modified_base 12: mod_base = OTHER; note = 2'O-methyl uridine
  modified_base 13: mod_base = OTHER; note = 2'O-methyl cytidine
  modified_base 14: mod_base = OTHER; note = 2'-fluoro adenosine
  modified_base 15: mod_base = OTHER; note = 2'O-methyl uridine
  modified_base 16: mod_base = OTHER; note = 2'-fluoro cytidine
  modified_base 17: mod_base = OTHER; note = 2'O-methyl cytidine
  modified_base 18: mod_base = OTHER; note = 2'O-methyl uridine
  modified_base 19: mod_base = OTHER; note = 2'O-methyl uridine
  modified_base 20: mod_base = OTHER; note = 2'O-methyl guanosine
  modified_base 21: mod_base = OTHER; note = 2'O-methyl guanosine phosphorothioate
  modified_base 22: mod_base = OTHER; note = 2'O-methyl uridine phosphorothioate
  modified_base 23: mod_base = OTHER; note = 2'O-methyl uridine
tggtaatctcttcatccttggtt

SEQ ID NO: 554 - RNA, 23 nt, synthetic construct
  source 1..23: mol_type = other RNA
  modified_base 1: mod_base = OTHER; note = 2'O-methyl adenosine phosphorothioate
  modified_base 2: mod_base = OTHER; note = 2'-fluoro adenosine phosphorothioate
  modified_base 3: mod_base = OTHER; note = 2'O-methyl adenosine
  modified_base 4: mod_base = OTHER; note = 2'O-methyl uridine
  modified_base 5: mod_base = OTHER; note = 2'O-methyl guanosine
  modified_base 6: mod_base = OTHER; note = 2'-fluoro uridine
  modified_base 7: mod_base = OTHER; note = 2'O-methyl cytidine
  modified_base 8: mod_base = OTHER; note = 2'O-methyl uridine
  modified_base 9: mod_base = OTHER; note = 2'O-methyl uridine
  modified_base 10: mod_base = OTHER; note = 2'O-methyl guanosine
  modified_base 11: mod_base = OTHER; note = 2'O-methyl guanosine
  modified_base 12: mod_base = OTHER; note = 2'O-methyl uridine
  modified_base 13: mod_base = OTHER; note = 2'O-methyl adenosine
  modified_base 14: mod_base = OTHER; note = 2'-fluoro adenosine
  modified_base 15: mod_base = OTHER; note = 2'O-methyl uridine
  modified_base 16: mod_base = OTHER; note = 2'-fluoro cytidine
  modified_base 17: mod_base = OTHER; note = 2'O-methyl uridine
  modified_base 18: mod_base = OTHER; note = 2'O-methyl cytidine
  modified_base 19: mod_base = OTHER; note = 2'O-methyl uridine
  modified_base 20: mod_base = OTHER; note = 2'O-methyl uridine
  modified_base 21: mod_base = OTHER; note = 2'O-methyl cytidine phosphorothioate
  modified_base 22: mod_base = OTHER; note = 2'O-methyl uridine phosphorothioate
  modified_base 23: mod_base = OTHER; note = 2'O-methyl uridine
aaatgtcttggtaatctcttctt

SEQ ID NO: 555 - RNA, 23 nt, synthetic construct
  source 1..23: mol_type = other RNA
  modified_base 1: mod_base = OTHER; note = 2'O-methyl uridine phosphorothioate
  modified_base 2: mod_base = OTHER; note = 2'-fluoro cytidine phosphorothioate
  modified_base 3: mod_base = OTHER; note = 2'O-methyl adenosine
  modified_base 4: mod_base = OTHER; note = 2'O-methyl adenosine
  modified_base 5: mod_base = OTHER; note = 2'O-methyl adenosine
  modified_base 6: mod_base = OTHER; note = 2'-fluoro uridine
  modified_base 7: mod_base = OTHER; note = 2'O-methyl guanosine
  modified_base 8: mod_base = OTHER; note = 2'O-methyl uridine
  modified_base 9: mod_base = OTHER; note = 2'O-methyl cytidine
  modified_base 10: mod_base = OTHER; note = 2'O-methyl uridine
  modified_base 11: mod_base = OTHER; note = 2'O-methyl uridine
  modified_base 12: mod_base = OTHER; note = 2'O-methyl guanosine
  modified_base 13: mod_base = OTHER; note = 2'O-methyl guanosine
  modified_base 14: mod_base = OTHER; note = 2'-fluoro uridine
  modified_base 15: mod_base = OTHER; note = 2'O-methyl adenosine
  modified_base 16: mod_base = OTHER; note = 2'-fluoro adenosine
  modified_base 17: mod_base = OTHER; note = 2'O-methyl uridine
  modified_base 18: mod_base = OTHER; note = 2'O-methyl cytidine
  modified_base 19: mod_base = OTHER; note = 2'O-methyl uridine
  modified_base 20: mod_base = OTHER; note = 2'O-methyl cytidine
  modified_base 21: mod_base = OTHER; note = 2'O-methyl uridine phosphorothioate
  modified_base 22: mod_base = OTHER; note = 2'O-methyl uridine phosphorothioate
  modified_base 23: mod_base = OTHER; note = 2'O-methyl uridine
tcaaatgtcttggtaatctcttt

SEQ ID NO: 556 - RNA, 23 nt, synthetic construct
  source 1..23: mol_type = other RNA
  modified_base 1: mod_base = OTHER; note = 2'O-methyl adenosine phosphorothioate
  modified_base 2: mod_base = OTHER; note = 2'-fluoro cytidine phosphorothioate
  modified_base 3: mod_base = OTHER; note = 2'O-methyl cytidine
  modified_base 4: mod_base = OTHER; note = 2'O-methyl uridine
  modified_base 5: mod_base = OTHER; note = 2'O-methyl cytidine
  modified_base 6: mod_base = OTHER; note = 2'-fluoro adenosine
  modified_base 7: mod_base = OTHER; note = 2'O-methyl adenosine
  modified_base 8: mod_base = OTHER; note = 2'O-methyl adenosine
  modified_base 9: mod_base = OTHER; note = 2'O-methyl uridine
  modified_base 10: mod_base = OTHER; note = 2'O-methyl guanosine
  modified_base 11: mod_base = OTHER; note = 2'O-methyl uridine
  modified_base 12: mod_base = OTHER; note = 2'O-methyl cytidine
  modified_base 13: mod_base = OTHER; note = 2'O-methyl uridine
  modified_base 14: mod_base = OTHER; note = 2'-fluoro uridine
  modified_base 15: mod_base = OTHER; note = 2'O-methyl guanosine
  modified_base 16: mod_base = OTHER; note = 2'-fluoro guanosine
  modified_base 17: mod_base = OTHER; note = 2'O-methyl uridine
  modified_base 18: mod_base = OTHER; note = 2'O-methyl adenosine
  modified_base 19: mod_base = OTHER; note = 2'O-methyl adenosine
  modified_base 20: mod_base = OTHER; note = 2'O-methyl uridine
  modified_base 21: mod_base = OTHER; note = 2'O-methyl cytidine phosphorothioate
  modified_base 22: mod_base = OTHER; note = 2'O-methyl uridine phosphorothioate
  modified_base 23: mod_base = OTHER; note = 2'O-methyl uridine
acctcaaatgtcttggtaatctt

SEQ ID NO: 557 - RNA, 23 nt, synthetic construct
  source 1..23: mol_type = other RNA
  modified_base 1: mod_base = OTHER; note = 2'O-methyl uridine phosphorothioate
  modified_base 2: mod_base = OTHER; note = 2'-fluoro uridine phosphorothioate
  modified_base 3: mod_base = OTHER; note = 2'O-methyl guanosine
  modified_base 4: mod_base = OTHER; note = 2'O-methyl adenosine
  modified_base 5: mod_base = OTHER; note = 2'O-methyl cytidine
  modified_base 6: mod_base = OTHER; note = 2'-fluoro cytidine
  modified_base 7: mod_base = OTHER; note = 2'O-methyl uridine
  modified_base 8: mod_base = OTHER; note = 2'O-methyl cytidine
  modified_base 9: mod_base = OTHER; note = 2'O-methyl adenosine
  modified_base 10: mod_base = OTHER; note = 2'O-methyl adenosine
  modified_base 11: mod_base = OTHER; note = 2'O-methyl adenosine
  modified_base 12: mod_base = OTHER; note = 2'O-methyl uridine
  modified_base 13: mod_base = OTHER; note = 2'O-methyl guanosine
  modified_base 14: mod_base = OTHER; note = 2'-fluoro uridine
  modified_base 15: mod_base = OTHER; note = 2'O-methyl cytidine
  modified_base 16: mod_base = OTHER; note = 2'-fluoro uridine
  modified_base 17: mod_base = OTHER; note = 2'O-methyl uridine
  modified_base 18: mod_base = OTHER; note = 2'O-methyl guanosine
  modified_base 19: mod_base = OTHER; note = 2'O-methyl guanosine
  modified_base 20: mod_base = OTHER; note = 2'O-methyl uridine
  modified_base 21: mod_base = OTHER; note = 2'O-methyl adenosine phosphorothioate
  modified_base 22: mod_base = OTHER; note = 2'O-methyl uridine phosphorothioate
  modified_base 23: mod_base = OTHER; note = 2'O-methyl uridine
ttgacctcaaatgtcttggtatt

SEQ ID NO: 558 - RNA, 23 nt, synthetic construct
  source 1..23: mol_type = other RNA
  modified_base 1: mod_base = OTHER; note = 2'O-methyl uridine phosphorothioate
  modified_base 2: mod_base = OTHER; note = 2'-fluoro guanosine phosphorothioate
  modified_base 3: mod_base = OTHER; note = 2'O-methyl adenosine
  modified_base 4: mod_base = OTHER; note = 2'O-methyl uridine
  modified_base 5: mod_base = OTHER; note = 2'O-methyl cytidine
  modified_base 6: mod_base = OTHER; note = 2'-fluoro cytidine
  modified_base 7: mod_base = OTHER; note = 2'O-methyl adenosine
  modified_base 8: mod_base = OTHER; note = 2'O-methyl adenosine
  modified_base 9: mod_base = OTHER; note = 2'O-methyl adenosine
  modified_base 10: mod_base = OTHER; note = 2'O-methyl adenosine
  modified_base 11: mod_base = OTHER; note = 2'O-methyl adenosine
  modified_base 12: mod_base = OTHER; note = 2'O-methyl uridine
  modified_base 13: mod_base = OTHER; note = 2'O-methyl guanosine
  modified_base 14: mod_base = OTHER; note = 2'-fluoro uridine
  modified_base 15: mod_base = OTHER; note = 2'O-methyl cytidine
  modified_base 16: mod_base = OTHER; note = 2'-fluoro cytidine
  modified_base 17: mod_base = OTHER; note = 2'O-methyl uridine
  modified_base 18: mod_base = OTHER; note = 2'O-methyl adenosine
  modified_base 19: mod_base = OTHER; note = 2'O-methyl guanosine
  modified_base 20: mod_base = OTHER; note = 2'O-methyl guanosine
  modified_base 21: mod_base = OTHER; note = 2'O-methyl adenosine phosphorothioate
  modified_base 22: mod_base = OTHER; note = 2'O-methyl uridine phosphorothioate
  modified_base 23: mod_base = OTHER; note = 2'O-methyl uridine
tgatccaaaaatgtcctaggatt

SEQ ID NO: 559 - RNA, 23 nt, synthetic construct
  source 1..23: mol_type = other RNA
  modified_base 1: mod_base = OTHER; note = 2'O-methyl uridine phosphorothioate
  modified_base 2: mod_base = OTHER; note = 2'-fluoro guanosine phosphorothioate
  modified_base 3: mod_base = OTHER; note = 2'O-methyl uridine
  modified_base 4: mod_base = OTHER; note = 2'O-methyl guanosine
  modified_base 5: mod_base = OTHER; note = 2'O-methyl adenosine
  modified_base 6: mod_base = OTHER; note = 2'-fluoro uridine
  modified_base 7: mod_base = OTHER; note = 2'O-methyl cytidine
  modified_base 8: mod_base = OTHER; note = 2'O-methyl cytidine
  modified_base 9: mod_base = OTHER; note = 2'O-methyl adenosine
  modified_base 10: mod_base = OTHER; note = 2'O-methyl adenosine
  modified_base 11: mod_base = OTHER; note = 2'O-methyl adenosine
  modified_base 12: mod_base = OTHER; note = 2'O-methyl adenosine
  modified_base 13: mod_base = OTHER; note = 2'O-methyl adenosine
  modified_base 14: mod_base = OTHER; note = 2'-fluoro uridine
  modified_base 15: mod_base = OTHER; note = 2'O-methyl guanosine
  modified_base 16: mod_base = OTHER; note = 2'-fluoro uridine
  modified_base 17: mod_base = OTHER; note = 2'O-methyl cytidine
  modified_base 18: mod_base = OTHER; note = 2'O-methyl cytidine
  modified_base 19: mod_base = OTHER; note = 2'O-methyl uridine
  modified_base 20: mod_base = OTHER; note = 2'O-methyl adenosine
  modified_base 21: mod_base = OTHER; note = 2'O-methyl guanosine phosphorothioate
  modified_base 22: mod_base = OTHER; note = 2'O-methyl uridine phosphorothioate
  modified_base 23: mod_base = OTHER; note = 2'O-methyl uridine
tgtgatccaaaaatgtcctagtt

SEQ ID NO: 560 - RNA, 23 nt, synthetic construct
  source 1..23: mol_type = other RNA
  modified_base 1: mod_base = OTHER; note = 2'O-methyl adenosine phosphorothioate
  modified_base 2: mod_base = OTHER; note = 2'-fluoro guanosine phosphorothioate
  modified_base 3: mod_base = OTHER; note = 2'O-methyl uridine
  modified_base 4: mod_base = OTHER; note = 2'O-methyl guanosine
  modified_base 5: mod_base = OTHER; note = 2'O-methyl cytidine
  modified_base 6: mod_base = OTHER; note = 2'-fluoro uridine
  modified_base 7: mod_base = OTHER; note = 2'O-methyl uridine
  modified_base 8: mod_base = OTHER; note = 2'O-methyl uridine
  modified_base 9: mod_base = OTHER; note = 2'O-methyl uridine
  modified_base 10: mod_base = OTHER; note = 2'O-methyl guanosine
  modified_base 11: mod_base = OTHER; note = 2'O-methyl uridine
  modified_base 12: mod_base = OTHER; note = 2'O-methyl guanosine
  modified_base 13: mod_base = OTHER; note = 2'O-methyl adenosine
  modified_base 14: mod_base = OTHER; note = 2'-fluoro uridine
  modified_base 15: mod_base = OTHER; note = 2'O-methyl cytidine
  modified_base 16: mod_base = OTHER; note = 2'-fluoro cytidine
  modified_base 17: mod_base = OTHER; note = 2'O-methyl adenosine
  modified_base 18: mod_base = OTHER; note = 2'O-methyl adenosine
  modified_base 19: mod_base = OTHER; note = 2'O-methyl adenosine
  modified_base 20: mod_base = OTHER; note = 2'O-methyl adenosine
  modified_base 21: mod_base = OTHER; note = 2'O-methyl adenosine phosphorothioate
  modified_base 22: mod_base = OTHER; note = 2'O-methyl uridine phosphorothioate
  modified_base 23: mod_base = OTHER; note = 2'O-methyl uridine
agtgcttttgtgatccaaaaatt

SEQ ID NO: 561 - RNA, 23 nt, synthetic construct
  source 1..23: mol_type = other RNA
  modified_base 1: mod_base = OTHER; note = 2'O-methyl adenosine phosphorothioate
  modified_base 2: mod_base = OTHER; note = 2'-fluoro adenosine phosphorothioate
  modified_base 3: mod_base = OTHER; note = 2'O-methyl guanosine
  modified_base 4: mod_base = OTHER; note = 2'O-methyl adenosine
  modified_base 5: mod_base = OTHER; note = 2'O-methyl adenosine
  modified_base 6: mod_base = OTHER; note = 2'-fluoro guanosine
  modified_base 7: mod_base = OTHER; note = 2'O-methyl uridine
  modified_base 8: mod_base = OTHER; note = 2'O-methyl guanosine
  modified_base 9: mod_base = OTHER; note = 2'O-methyl cytidine
  modified_base 10: mod_base = OTHER; note = 2'O-methyl uridine
  modified_base 11: mod_base = OTHER; note = 2'O-methyl uridine
  modified_base 12: mod_base = OTHER; note = 2'O-methyl uridine
  modified_base 13: mod_base = OTHER; note = 2'O-methyl uridine
  modified_base 14: mod_base = OTHER; note = 2'-fluoro guanosine
  modified_base 15: mod_base = OTHER; note = 2'O-methyl uridine
  modified_base 16: mod_base = OTHER; note = 2'-fluoro guanosine
  modified_base 17: mod_base = OTHER; note = 2'O-methyl adenosine
  modified_base 18: mod_base = OTHER; note = 2'O-methyl uridine
  modified_base 19: mod_base = OTHER; note = 2'O-methyl cytidine
  modified_base 20: mod_base = OTHER; note = 2'O-methyl cytidine
  modified_base 21: mod_base = OTHER; note = 2'O-methyl adenosine phosphorothioate
  modified_base 22: mod_base = OTHER; note = 2'O-methyl uridine phosphorothioate
  modified_base 23: mod_base = OTHER; note = 2'O-methyl uridine
aagaagtgcttttgtgatccatt

SEQ ID NO: 562 - RNA, 23 nt, synthetic construct
  source 1..23: mol_type = other RNA
  modified_base 1: mod_base = OTHER; note = 2'O-methyl uridine phosphorothioate
  modified_base 2: mod_base = OTHER; note = 2'-fluoro uridine phosphorothioate
  modified_base 3: mod_base = OTHER; note = 2'O-methyl uridine
  modified_base 4: mod_base = OTHER; note = 2'O-methyl guanosine
  modified_base 5: mod_base = OTHER; note = 2'O-methyl adenosine
  modified_base 6: mod_base = OTHER; note = 2'-fluoro uridine
  modified_base 7: mod_base = OTHER; note = 2'O-methyl adenosine
  modified_base 8: mod_base = OTHER; note = 2'O-methyl cytidine
  modified_base 9: mod_base = OTHER; note = 2'O-methyl cytidine
  modified_base 10: mod_base = OTHER; note = 2'O-methyl adenosine
  modified_base 11: mod_base = OTHER; note = 2'O-methyl guanosine
  modified_base 12: mod_base = OTHER; note = 2'O-methyl uridine
  modified_base 13: mod_base = OTHER; note = 2'O-methyl uridine
  modified_base 14: mod_base = OTHER; note = 2'-fluoro uridine
  modified_base 15: mod_base = OTHER; note = 2'O-methyl uridine
  modified_base 16: mod_base = OTHER; note = 2'-fluoro uridine
  modified_base 17: mod_base = OTHER; note = 2'O-methyl cytidine
  modified_base 18: mod_base = OTHER; note = 2'O-methyl cytidine
  modified_base 19: mod_base = OTHER; note = 2'O-methyl cytidine
  modified_base 20: mod_base = OTHER; note = 2'O-methyl adenosine
  modified_base 21: mod_base = OTHER; note = 2'O-methyl adenosine phosphorothioate
  modified_base 22: mod_base = OTHER; note = 2'O-methyl uridine phosphorothioate
  modified_base 23: mod_base = OTHER; note = 2'O-methyl uridine
tttgataccagtttttcccaatt

SEQ ID NO: 563 - RNA, 23 nt, synthetic construct
  source 1..23: mol_type = other RNA
  modified_base 1: mod_base = OTHER; note = 2'O-methyl uridine phosphorothioate
  modified_base 2: mod_base = OTHER; note = 2'-fluoro guanosine phosphorothioate
  modified_base 3: mod_base = OTHER; note = 2'O-methyl adenosine
  modified_base 4: mod_base = OTHER; note = 2'O-methyl guanosine
  modified_base 5: mod_base = OTHER; note = 2'O-methyl guanosine
  modified_base 6: mod_base = OTHER; note = 2'-fluoro uridine
  modified_base 7: mod_base = OTHER; note = 2'O-methyl uridine
  modified_base 8: mod_base = OTHER; note = 2'O-methyl uridine
  modified_base 9: mod_base = OTHER; note = 2'O-methyl uridine
  modified_base 10: mod_base = OTHER; note = 2'O-methyl guanosine
  modified_base 11: mod_base = OTHER; note = 2'O-methyl adenosine
  modified_base 12: mod_base = OTHER; note = 2'O-methyl uridine
  modified_base 13: mod_base = OTHER; note = 2'O-methyl adenosine
  modified_base 14: mod_base = OTHER; note = 2'-fluoro cytidine
  modified_base 15: mod_base = OTHER; note = 2'O-methyl cytidine
  modified_base 16: mod_base = OTHER; note = 2'-fluoro adenosine
  modified_base 17: mod_base = OTHER; note = 2'O-methyl guanosine
  modified_base 18: mod_base = OTHER; note = 2'O-methyl uridine
  modified_base 19: mod_base = OTHER; note = 2'O-methyl uridine
  modified_base 20: mod_base = OTHER; note = 2'O-methyl uridine
  modified_base 21: mod_base = OTHER; note = 2'O-methyl uridine phosphorothioate
  modified_base 22: mod_base = OTHER; note = 2'O-methyl uridine phosphorothioate
  modified_base 23: mod_base = OTHER; note = 2'O-methyl uridine
tgaggttttgataccagtttttt

SEQ ID NO: 564 - RNA, 23 nt, synthetic construct
  source 1..23: mol_type = other RNA
  modified_base 1: mod_base = OTHER; note = 2'O-methyl adenosine phosphorothioate
  modified_base 2: mod_base = OTHER; note = 2'-fluoro uridine phosphorothioate
  modified_base 3: mod_base = OTHER; note = 2'O-methyl cytidine
  modified_base 4: mod_base = OTHER; note = 2'O-methyl adenosine
  modified_base 5: mod_base = OTHER; note = 2'O-methyl guanosine
  modified_base 6: mod_base = OTHER; note = 2'-fluoro adenosine
  modified_base 7: mod_base = OTHER; note = 2'O-methyl cytidine
  modified_base 8: mod_base = OTHER; note = 2'O-methyl uridine
  modified_base 9: mod_base = OTHER; note = 2'O-methyl uridine
  modified_base 10: mod_base = OTHER; note = 2'O-methyl cytidine
  modified_base 11: mod_base = OTHER; note = 2'O-methyl uridine
  modified_base 12: mod_base = OTHER; note = 2'O-methyl uridine
  modified_base 13: mod_base = OTHER; note = 2'O-methyl adenosine
  modified_base 14: mod_base = OTHER; note = 2'-fluoro cytidine
  modified_base 15: mod_base = OTHER; note = 2'O-methyl guanosine
  modified_base 16: mod_base = OTHER; note = 2'-fluoro adenosine
  modified_base 17: mod_base = OTHER; note = 2'O-methyl cytidine
  modified_base 18: mod_base = OTHER; note = 2'O-methyl uridine
  modified_base 19: mod_base = OTHER; note = 2'O-methyl uridine
  modified_base 20: mod_base = OTHER; note = 2'O-methyl cytidine
  modified_base 21: mod_base = OTHER; note = 2'O-methyl adenosine phosphorothioate
  modified_base 22: mod_base = OTHER; note = 2'O-methyl uridine phosphorothioate
  modified_base 23: mod_base = OTHER; note = 2'O-methyl uridine
atcagacttcttacgacttcatt

SEQ ID NO: 565 - RNA, 23 nt, synthetic construct
  source 1..23: mol_type = other RNA
  modified_base 1: mod_base = OTHER; note = 2'O-methyl adenosine phosphorothioate
  modified_base 2: mod_base = OTHER; note = 2'-fluoro adenosine phosphorothioate
  modified_base 3: mod_base = OTHER; note = 2'O-methyl guanosine
  modified_base 4: mod_base = OTHER; note = 2'O-methyl uridine
  modified_base 5: mod_base = OTHER; note = 2'O-methyl adenosine
  modified_base 6: mod_base = OTHER; note = 2'-fluoro uridine
  modified_base 7: mod_base = OTHER; note = 2'O-methyl uridine
  modified_base 8: mod_base = OTHER; note = 2'O-methyl cytidine
  modified_base 9: mod_base = OTHER; note = 2'O-methyl cytidine
  modified_base 10: mod_base = OTHER; note = 2'O-methyl adenosine
  modified_base 11: mod_base = OTHER; note = 2'O-methyl uridine
  modified_base 12: mod_base = OTHER; note = 2'O-methyl cytidine
  modified_base 13: mod_base = OTHER; note = 2'O-methyl uridine
  modified_base 14: mod_base = OTHER; note = 2'-fluoro adenosine
  modified_base 15: mod_base = OTHER; note = 2'O-methyl uridine
  modified_base 16: mod_base = OTHER; note = 2'-fluoro cytidine
  modified_base 17: mod_base = OTHER; note = 2'O-methyl adenosine
  modified_base 18: mod_base = OTHER; note = 2'O-methyl guanosine
  modified_base 19: mod_base = OTHER; note = 2'O-methyl adenosine
  modified_base 20: mod_base = OTHER; note = 2'O-methyl cytidine
  modified_base 21: mod_base = OTHER; note = 2'O-methyl uridine phosphorothioate
  modified_base 22: mod_base = OTHER; note = 2'O-methyl uridine phosphorothioate
  modified_base 23: mod_base = OTHER; note = 2'O-methyl uridine
aagtattccatctatcagacttt

SEQ ID NO: 566 - RNA, 23 nt, synthetic construct
  source 1..23: mol_type = other RNA
  modified_base 1: mod_base = OTHER; note = 2'O-methyl uridine phosphorothioate
  modified_base 2: mod_base = OTHER; note = 2'-fluoro adenosine phosphorothioate
  modified_base 3: mod_base = OTHER; note = 2'O-methyl adenosine
  modified_base 4: mod_base = OTHER; note = 2'O-methyl guanosine
  modified_base 5: mod_base = OTHER; note = 2'O-methyl uridine
  modified_base 6: mod_base = OTHER; note = 2'-fluoro adenosine
  modified_base 7: mod_base = OTHER; note = 2'O-methyl uridine
  modified_base 8: mod_base = OTHER; note = 2'O-methyl uridine
  modified_base 9: mod_base = OTHER; note = 2'O-methyl cytidine
  modified_base 10: mod_base = OTHER; note = 2'O-methyl cytidine
  modified_base 11: mod_base = OTHER; note = 2'O-methyl adenosine
  modified_base 12: mod_base = OTHER; note = 2'O-methyl uridine
  modified_base 13: mod_base = OTHER; note = 2'O-methyl cytidine
  modified_base 14: mod_base = OTHER; note = 2'-fluoro uridine
  modified_base 15: mod_base = OTHER; note = 2'O-methyl adenosine
  modified_base 16: mod_base = OTHER; note = 2'-fluoro uridine
  modified_base 17: mod_base = OTHER; note = 2'O-methyl cytidine
  modified_base 18: mod_base = OTHER; note = 2'O-methyl adenosine
  modified_base 19: mod_base = OTHER; note = 2'O-methyl guanosine
  modified_base 20: mod_base = OTHER; note = 2'O-methyl adenosine
  modified_base 21: mod_base = OTHER; note = 2'O-methyl cytidine phosphorothioate
  modified_base 22: mod_base = OTHER; note = 2'O-methyl uridine phosphorothioate
  modified_base 23: mod_base = OTHER; note = 2'O-methyl uridine
taagtattccatctatcagactt

SEQ ID NO: 567 - RNA, 23 nt, synthetic construct
  source 1..23: mol_type = other RNA
  modified_base 1: mod_base = OTHER; note = 2'O-methyl uridine phosphorothioate
  modified_base 2: mod_base = OTHER; note = 2'-fluoro uridine phosphorothioate
  modified_base 3: mod_base = OTHER; note = 2'O-methyl adenosine
  modified_base 4: mod_base = OTHER; note = 2'O-methyl uridine
  modified_base 5: mod_base = OTHER; note = 2'O-methyl uridine
  modified_base 6: mod_base = OTHER; note = 2'-fluoro guanosine
  modified_base 7: mod_base = OTHER; note = 2'O-methyl guanosine
  modified_base 8: mod_base = OTHER; note = 2'O-methyl uridine
  modified_base 9: mod_base = OTHER; note = 2'O-methyl adenosine
  modified_base 10: mod_base = OTHER; note = 2'O-methyl adenosine
  modified_base 11: mod_base = OTHER; note = 2'O-methyl guanosine
  modified_base 12: mod_base = OTHER; note = 2'O-methyl uridine
  modified_base 13: mod_base = OTHER; note = 2'O-methyl adenosine
  modified_base 14: mod_base = OTHER; note = 2'-fluoro uridine
  modified_base 15: mod_base = OTHER; note = 2'O-methyl uridine
  modified_base 16: mod_base = OTHER; note = 2'-fluoro cytidine
  modified_base 17: mod_base = OTHER; note = 2'O-methyl cytidine
  modified_base 18: mod_base = OTHER; note = 2'O-methyl adenosine
  modified_base 19: mod_base = OTHER; note = 2'O-methyl uridine
  modified_base 20: mod_base = OTHER; note = 2'O-methyl cytidine
  modified_base 21: mod_base = OTHER; note = 2'O-methyl uridine phosphorothioate
  modified_base 22: mod_base = OTHER; note = 2'O-methyl uridine phosphorothioate
  modified_base 23: mod_base = OTHER; note = 2'O-methyl uridine
ttattggtaagtattccatcttt

SEQ ID NO: 568 - RNA, 23 nt, synthetic construct
  source 1..23: mol_type = other RNA
  modified_base 1: mod_base = OTHER; note = 2'O-methyl uridine phosphorothioate
  modified_base 2: mod_base = OTHER; note = 2'-fluoro uridine phosphorothioate
  modified_base 3: mod_base = OTHER; note = 2'O-methyl cytidine
  modified_base 4: mod_base = OTHER; note = 2'O-methyl uridine
  modified_base 5: mod_base = OTHER; note = 2'O-methyl uridine
  modified_base 6: mod_base = OTHER; note = 2'-fluoro adenosine
  modified_base 7: mod_base = OTHER; note = 2'O-methyl uridine
  modified_base 8: mod_base = OTHER; note = 2'O-methyl uridine
  modified_base 9: mod_base = OTHER; note = 2'O-methyl guanosine
  modified_base 10: mod_base = OTHER; note = 2'O-methyl guanosine
  modified_base 11: mod_base = OTHER; note = 2'O-methyl uridine
  modified_base 12: mod_base = OTHER; note = 2'O-methyl adenosine
  modified_base 13: mod_base = OTHER; note = 2'O-methyl adenosine
  modified_base 14: mod_base = OTHER; note = 2'-fluoro guanosine
  modified_base 15: mod_base = OTHER; note = 2'O-methyl uridine
  modified_base 16: mod_base = OTHER; note = 2'-fluoro adenosine
  modified_base 17: mod_base = OTHER; note = 2'O-methyl uridine
  modified_base 18: mod_base = OTHER; note = 2'O-methyl uridine
  modified_base 19: mod_base = OTHER; note = 2'O-methyl cytidine
  modified_base 20: mod_base = OTHER; note = 2'O-methyl cytidine
  modified_base 21: mod_base = OTHER; note = 2'O-methyl adenosine phosphorothioate
  modified_base 22: mod_base = OTHER; note = 2'O-methyl uridine phosphorothioate
  modified_base 23: mod_base = OTHER; note = 2'O-methyl uridine
ttcttattggtaagtattccatt

SEQ ID NO: 569 - RNA, 23 nt, synthetic construct
  source 1..23: mol_type = other RNA
  modified_base 1: mod_base = OTHER; note = 2'O-methyl adenosine phosphorothioate
  modified_base 2: mod_base = OTHER; note = 2'-fluoro uridine phosphorothioate
  modified_base 3: mod_base = OTHER; note = 2'O-methyl cytidine
  modified_base 4: mod_base = OTHER; note = 2'O-methyl adenosine
  modified_base 5: mod_base = OTHER; note = 2'O-methyl uridine
  modified_base 6: mod_base = OTHER; note = 2'-fluoro uridine
  modified_base 7: mod_base = OTHER; note = 2'O-methyl uridine
  modified_base 8: mod_base = OTHER; note = 2'O-methyl uridine
  modified_base 9: mod_base = OTHER; note = 2'O-methyl cytidine
  modified_base 10: mod_base = OTHER; note = 2'O-methyl uridine
  modified_base 11: mod_base = OTHER; note = 2'O-methyl uridine
  modified_base 12: mod_base = OTHER; note = 2'O-methyl adenosine
  modified_base 13: mod_base = OTHER; note = 2'O-methyl uridine
  modified_base 14: mod_base = OTHER; note = 2'-fluoro uridine
  modified_base 15: mod_base = OTHER; note = 2'O-methyl guanosine
  modified_base 16: mod_base = OTHER; note = 2'-fluoro guanosine
  modified_base 17: mod_base = OTHER; note = 2'O-methyl uridine
  modified_base 18: mod_base = OTHER; note = 2'O-methyl adenosine
  modified_base 19: mod_base = OTHER; note = 2'O-methyl adenosine
  modified_base 20: mod_base = OTHER; note = 2'O-methyl guanosine
  modified_base 21: mod_base = OTHER; note = 2'O-methyl uridine phosphorothioate
  modified_base 22: mod_base = OTHER; note = 2'O-methyl uridine phosphorothioate
  modified_base 23: mod_base = OTHER; note = 2'O-methyl uridine
atcattttcttattggtaagttt

SEQ ID NO: 570 - RNA, 23 nt, synthetic construct
  source 1..23: mol_type = other RNA
  modified_base 1: mod_base = OTHER; note = 2'O-methyl adenosine phosphorothioate
  modified_base 2: mod_base = OTHER; note = 2'-fluoro adenosine phosphorothioate
  modified_base 3: mod_base = OTHER; note = 2'O-methyl uridine
  modified_base 4: mod_base = OTHER; note = 2'O-methyl cytidine
  modified_base 5: mod_base = OTHER; note = 2'O-methyl adenosine
  modified_base 6: mod_base = OTHER; note = 2'-fluoro uridine
  modified_base 7: mod_base = OTHER; note = 2'O-methyl uridine
  modified_base 8: mod_base = OTHER; note = 2'O-methyl uridine
  modified_base 9: mod_base = OTHER; note = 2'O-methyl uridine
  modified_base 10: mod_base = OTHER; note = 2'O-methyl cytidine
  modified_base 11: mod_base = OTHER; note = 2'O-methyl uridine
  modified_base 12: mod_base = OTHER; note = 2'O-methyl uridine
  modified_base 13: mod_base = OTHER; note = 2'O-methyl adenosine
  modified_base 14: mod_base = OTHER; note = 2'-fluoro uridine
  modified_base 15: mod_base = OTHER; note = 2'O-methyl uridine
  modified_base 16: mod_base = OTHER; note = 2'-fluoro guanosine
  modified_base 17: mod_base = OTHER; note = 2'O-methyl guanosine
  modified_base 18: mod_base = OTHER; note = 2'O-methyl uridine
  modified_base 19: mod_base = OTHER; note = 2'O-methyl adenosine
  modified_base 20: mod_base = OTHER; note = 2'O-methyl adenosine
  modified_base 21: mod_base = OTHER; note = 2'O-methyl guanosine phosphorothioate
  modified_base 22: mod_base = OTHER; note = 2'O-methyl uridine phosphorothioate
  modified_base 23: mod_base = OTHER; note = 2'O-methyl uridine
aatcattttcttattggtaagtt

SEQ ID NO: 571 - RNA, 23 nt, synthetic construct
  source 1..23: mol_type = other RNA
  modified_base 1: mod_base = OTHER; note = 2'O-methyl adenosine phosphorothioate
  modified_base 2: mod_base = OTHER; note = 2'-fluoro adenosine phosphorothioate
  modified_base 3: mod_base = OTHER; note = 2'O-methyl adenosine
  modified_base 4: mod_base = OTHER; note = 2'O-methyl adenosine
  modified_base 5: mod_base = OTHER; note = 2'O-methyl adenosine
  modified_base 6: mod_base = OTHER; note = 2'-fluoro uridine
  modified_base 7: mod_base = OTHER; note = 2'O-methyl cytidine
  modified_base 8: mod_base = OTHER; note = 2'O-methyl adenosine
  modified_base 9: mod_base = OTHER; note = 2'O-methyl uridine
  modified_base 10: mod_base = OTHER; note = 2'O-methyl uridine
  modified_base 11: mod_base = OTHER; note = 2'O-methyl uridine
  modified_base 12: mod_base = OTHER; note = 2'O-methyl uridine
  modified_base 13: mod_base = OTHER; note = 2'O-methyl cytidine
  modified_base 14: mod_base = OTHER; note = 2'-fluoro uridine
  modified_base 15: mod_base = OTHER; note = 2'O-methyl uridine
  modified_base 16: mod_base = OTHER; note = 2'-fluoro adenosine
  modified_base 17: mod_base = OTHER; note = 2'O-methyl uridine
  modified_base 18: mod_base = OTHER; note = 2'O-methyl uridine
  modified_base 19: mod_base = OTHER; note = 2'O-methyl guanosine
  modified_base 20: mod_base = OTHER; note = 2'O-methyl guanosine
  modified_base 21: mod_base = OTHER; note = 2'O-methyl uridine phosphorothioate
  modified_base 22: mod_base = OTHER; note = 2'O-methyl uridine phosphorothioate
  modified_base 23: mod_base = OTHER; note = 2'O-methyl uridine
aaaaatcattttcttattggttt

SEQ ID NO: 572 - RNA, 23 nt, synthetic construct
  source 1..23: mol_type = other RNA
  modified_base 1: mod_base = OTHER; note = 2'O-methyl uridine phosphorothioate
  modified_base 2: mod_base = OTHER; note = 2'-fluoro guanosine phosphorothioate
  modified_base 3: mod_base = OTHER; note = 2'O-methyl guanosine
  modified_base 4: mod_base = OTHER; note = 2'O-methyl adenosine
  modified_base 5: mod_base = OTHER; note = 2'O-methyl adenosine
  modified_base 6: mod_base = OTHER; note = 2'-fluoro cytidine
  modified_base 7: mod_base = OTHER; note = 2'O-methyl adenosine
  modified_base 8: mod_base = OTHER; note = 2'O-methyl adenosine
  modified_base 9: mod_base = OTHER; note = 2'O-methyl adenosine
  modified_base 10: mod_base = OTHER; note = 2'O-methyl adenosine
  modified_base 11: mod_base = OTHER; note = 2'O-methyl adenosine
  modified_base 12: mod_base = OTHER; note = 2'O-methyl uridine
  modified_base 13: mod_base = OTHER; note = 2'O-methyl cytidine
  modified_base 14: mod_base = OTHER; note = 2'-fluoro adenosine
  modified_base 15: mod_base = OTHER; note = 2'O-methyl uridine
  modified_base 16: mod_base = OTHER; note = 2'-fluoro uridine
  modified_base 17: mod_base = OTHER; note = 2'O-methyl uridine
  modified_base 18: mod_base = OTHER; note = 2'O-methyl uridine
  modified_base 19: mod_base = OTHER; note = 2'O-methyl cytidine
  modified_base 20: mod_base = OTHER; note = 2'O-methyl uridine
  modified_base 21: mod_base = OTHER; note = 2'O-methyl uridine phosphorothioate
  modified_base 22: mod_base = OTHER; note = 2'O-methyl uridine phosphorothioate
  modified_base 23: mod_base = OTHER; note = 2'O-methyl uridine
tggaacaaaaatcattttctttt

SEQ ID NO: 573 - RNA, 23 nt, synthetic construct
  source 1..23: mol_type = other RNA
  modified_base 1: mod_base = OTHER; note = 2'O-methyl uridine phosphorothioate
  modified_base 2: mod_base = OTHER; note = 2'-fluoro adenosine phosphorothioate
  modified_base 3: mod_base = OTHER; note = 2'O-methyl cytidine
  modified_base 4: mod_base = OTHER; note = 2'O-methyl guanosine
  modified_base 5: mod_base = OTHER; note = 2'O-methyl adenosine
  modified_base 6: mod_base = OTHER; note = 2'-fluoro uridine
  modified_base 7: mod_base = OTHER; note = 2'O-methyl guanosine
  modified_base 8: mod_base = OTHER; note = 2'O-methyl guanosine
  modified_base 9: mod_base = OTHER; note = 2'O-methyl adenosine
  modified_base 10: mod_base = OTHER; note = 2'O-methyl adenosine
  modified_base 11: mod_base = OTHER; note = 2'O-methyl cytidine
  modified_base 12: mod_base = OTHER; note = 2'O-methyl adenosine
  modified_base 13: mod_base = OTHER; note = 2'O-methyl adenosine
  modified_base 14: mod_base = OTHER; note = 2'-fluoro adenosine
  modified_base 15: mod_base = OTHER; note = 2'O-methyl adenosine
  modified_base 16: mod_base = OTHER; note = 2'-fluoro adenosine
  modified_base 17: mod_base = OTHER; note = 2'O-methyl uridine
  modified_base 18: mod_base = OTHER; note = 2'O-methyl cytidine
  modified_base 19: mod_base = OTHER; note = 2'O-methyl adenosine
  modified_base 20: mod_base = OTHER; note = 2'O-methyl uridine
  modified_base 21: mod_base = OTHER; note = 2'O-methyl uridine phosphorothioate
  modified_base 22: mod_base = OTHER; note = 2'O-methyl uridine phosphorothioate
  modified_base 23: mod_base = OTHER; note = 2'O-methyl uridine
tacgatggaacaaaaatcatttt

SEQ ID NO: 574 - RNA, 23 nt, synthetic construct
  source 1..23: mol_type = other RNA
  modified_base 1: mod_base = OTHER; note = 2'O-methyl adenosine phosphorothioate
  modified_base 2: mod_base = OTHER; note = 2'-fluoro uridine phosphorothioate
  modified_base 3: mod_base = OTHER; note = 2'O-methyl adenosine
  modified_base 4: mod_base = OTHER; note = 2'O-methyl cytidine
  modified_base 5: mod_base = OTHER; note = 2'O-methyl guanosine
  modified_base 6: mod_base = OTHER; note = 2'-fluoro adenosine
  modified_base 7: mod_base = OTHER; note = 2'O-methyl uridine
  modified_base 8: mod_base = OTHER; note = 2'O-methyl guanosine
  modified_base 9: mod_base = OTHER; note = 2'O-methyl guanosine
  modified_base 10: mod_base = OTHER; note = 2'O-methyl adenosine
  modified_base 11: mod_base = OTHER; note = 2'O-methyl adenosine
  modified_base 12: mod_base = OTHER; note = 2'O-methyl cytidine
  modified_base 13: mod_base = OTHER; note = 2'O-methyl adenosine
  modified_base 14: mod_base = OTHER; note = 2'-fluoro adenosine
  modified_base 15: mod_base = OTHER; note = 2'O-methyl adenosine
  modified_base 16: mod_base = OTHER; note = 2'-fluoro adenosine
  modified_base 17: mod_base = OTHER; note = 2'O-methyl adenosine
  modified_base 18: mod_base = OTHER; note = 2'O-methyl uridine
  modified_base 19: mod_base = OTHER; note = 2'O-methyl cytidine
  modified_base 20: mod_base = OTHER; note = 2'O-methyl adenosine
  modified_base 21: mod_base = OTHER; note = 2'O-methyl uridine phosphorothioate
  modified_base 22: mod_base = OTHER; note = 2'O-methyl uridine phosphorothioate
  modified_base 23: mod_base = OTHER; note = 2'O-methyl uridine
atacgatggaacaaaaatcattt

SEQ ID NO: 575 - RNA, 23 nt, synthetic construct
  source 1..23: mol_type = other RNA
  modified_base 1: mod_base = OTHER; note = 2'O-methyl uridine phosphorothioate
  modified_base 2: mod_base = OTHER; note = 2'-fluoro uridine phosphorothioate
  modified_base 3: mod_base = OTHER; note = 2'O-methyl guanosine
  modified_base 4: mod_base = OTHER; note = 2'O-methyl adenosine
  modified_base 5: mod_base = OTHER; note = 2'O-methyl uridine
  modified_base 6: mod_base = OTHER; note = 2'-fluoro adenosine
  modified_base 7: mod_base = OTHER; note = 2'O-methyl uridine
  modified_base 8: mod_base = OTHER; note = 2'O-methyl adenosine
  modified_base 9: mod_base = OTHER; note = 2'O-methyl cytidine
  modified_base 10: mod_base = OTHER; note = 2'O-methyl guanosine
  modified_base 11: mod_base = OTHER; note = 2'O-methyl adenosine
  modified_base 12: mod_base = OTHER; note = 2'O-methyl uridine
  modified_base 13: mod_base = OTHER; note = 2'O-methyl guanosine
  modified_base 14: mod_base = OTHER; note = 2'-fluoro guanosine
  modified_base 15: mod_base = OTHER; note = 2'O-methyl adenosine
  modified_base 16: mod_base = OTHER; note = 2'-fluoro adenosine
  modified_base 17: mod_base = OTHER; note = 2'O-methyl cytidine
  modified_base 18: mod_base = OTHER; note = 2'O-methyl adenosine
  modified_base 19: mod_base = OTHER; note = 2'O-methyl adenosine
  modified_base 20: mod_base = OTHER; note = 2'O-methyl adenosine
  modified_base 21: mod_base = OTHER; note = 2'O-methyl adenosine phosphorothioate
  modified_base 22: mod_base = OTHER; note = 2'O-methyl uridine phosphorothioate
  modified_base 23: mod_base = OTHER; note = 2'O-methyl uridine
ttgatatacgatggaacaaaatt

SEQ ID NO: 576 - RNA, 21 nt, synthetic construct
  source 1..21: mol_type = other RNA
  modified_base 1: mod_base = OTHER; note = 2'O-methyl cytidine phosphorothioate
  modified_base 2: mod_base = OTHER; note = 2'O-methyl uridine phosphorothioate
  modified_base 3: mod_base = OTHER; note = 2'O-methyl uridine
  modified_base 4: mod_base = OTHER; note = 2'O-methyl guanosine
  modified_base 5: mod_base = OTHER; note = 2'O-methyl guanosine
  modified_base 6: mod_base = OTHER; note = 2'O-methyl adenosine
  modified_base 7: mod_base = OTHER; note = 2'-fluoro guanosine
  modified_base 8: mod_base = OTHER; note = 2'O-methyl uridine
  modified_base 9: mod_base = OTHER; note = 2'-fluoro cytidine
  modified_base 10: mod_base = OTHER; note = 2'-fluoro guanosine
  modified_base 11: mod_base = OTHER; note = 2'-fluoro uridine
  modified_base 12: mod_base = OTHER; note = 2'O-methyl uridine
  modified_base 13: mod_base = OTHER; note = 2'O-methyl guanosine
  modified_base 14: mod_base = OTHER; note = 2'O-methyl guanosine
  modified_base 15: mod_base = OTHER; note = 2'O-methyl uridine
  modified_base 16: mod_base = OTHER; note = 2'O-methyl guanosine
  modified_base 17: mod_base = OTHER; note = 2'O-methyl adenosine
  modified_base 18: mod_base = OTHER; note = 2'O-methyl adenosine
  modified_base 19: mod_base = OTHER; note = 2'O-methyl guanosine
  modified_base 20: mod_base = OTHER; note = 2'O-methyl uridine phosphorothioate
  modified_base 21: mod_base = OTHER; note = 2'O-methyl uridine 6-(5-(((2R,3R,4R,5R,6R)-3-acetamido-4,5-dihydroxy-6-(hydrox ymethyl)tetrahydro-2H-pyran-2-yl)oxy)pentanamido)-N-(6-(4-( hydroxymethyl)-4-(methoxymethyl)piperidin-1-yl)-6-oxohexyl) hexanamide-phosphorothioate-6-(5-(((2R,3R,4R,5R,6R)-3-aceta mido-4,5-dihydroxy-6-(hydroxymethyl)tetrahydro-2H-pyran-2-y l)oxy)pentanamido)-N-(6-(4-(hydroxymethyl)-4-(methoxymethyl )piperidin-1-yl)-6-oxohexyl)hexanamide-phosphorothioate-6-( 5-(((2R,3R,4R,5R,6R)-3-acetamido-4,5-dihydroxy-6-(hydroxyme thyl)tetrahydro-2H-pyran-2-yl)oxy)pentanamido)-N-(6-(4-(hyd roxymethyl)-4-(methoxymethyl)piperidin-1-yl)-6-oxohexyl)hex anamide
cttggagtcgttggtgaagtt

SEQ ID NO: 577 - RNA, 19 nt, synthetic construct
  source 1..19: mol_type = other RNA
  modified_base 1: mod_base = OTHER; note = 2'O-methyl uridine phosphorothioate
  modified_base 2: mod_base = OTHER; note = 2'O-methyl guanosine phosphorothioate
  modified_base 3: mod_base = OTHER; note = 2'O-methyl guanosine
  modified_base 4: mod_base = OTHER; note = 2'O-methyl adenosine
  modified_base 5: mod_base = OTHER; note = 2'-fluoro guanosine
  modified_base 6: mod_base = OTHER; note = 2'O-methyl uridine
  modified_base 7: mod_base = OTHER; note = 2'-fluoro cytidine
  modified_base 8: mod_base = OTHER; note = 2'-fluoro guanosine
  modified_base 9: mod_base = OTHER; note = 2'-fluoro uridine
  modified_base 10: mod_base = OTHER; note = 2'O-methyl uridine
  modified_base 11: mod_base = OTHER; note = 2'O-methyl guanosine
  modified_base 12: mod_base = OTHER; note = 2'O-methyl guanosine
  modified_base 13: mod_base = OTHER; note = 2'O-methyl uridine
  modified_base 14: mod_base = OTHER; note = 2'O-methyl guanosine
  modified_base 15: mod_base = OTHER; note = 2'O-methyl adenosine
  modified_base 16: mod_base = OTHER; note = 2'O-methyl adenosine
  modified_base 17: mod_base = OTHER; note = 2'O-methyl guanosine
  modified_base 18: mod_base = OTHER; note = 2'O-methyl uridine
  modified_base 19: mod_base = OTHER; note = 2'O-methyl uridine 6-(5-(((2R,3R,4R,5R,6R)-3-acetamido-4,5-dihydroxy-6-(hydrox ymethyl)tetrahydro-2H-pyran-2-yl)oxy)pentanamido)-N-(6-(4-( hydroxymethyl)-4-(methoxymethyl)piperidin-1-yl)-6-oxohexyl) hexanamide-phosphorothioate-6-(5-(((2R,3R,4R,5R,6R)-3-aceta mido-4,5-dihydroxy-6-(hydroxymethyl)tetrahydro-2H-pyran-2-y l)oxy)pentanamido)-N-(6-(4-(hydroxymethyl)-4-(methoxymethyl )piperidin-1-yl)-6-oxohexyl)hexanamide-phosphorothioate-6-( 5-(((2R,3R,4R,5R,6R)-3-acetamido-4,5-dihydroxy-6-(hydroxyme thyl)tetrahydro-2H-pyran-2-yl)oxy)pentanamido)-N-(6-(4-(hyd roxymethyl)-4-(methoxymethyl)piperidin-1-yl)-6-oxohexyl)hex anamide
tggagtcgttggtgaagtt

SEQ ID NO: 578 - RNA, 19 nt, synthetic construct
  source 1..19: mol_type = other RNA
  modified_base 1: mod_base = OTHER; note = 2'O-methyl uridine phosphorothioate
  modified_base 2: mod_base = OTHER; note = 2'O-methyl guanosine phosphorothioate
  modified_base 3: mod_base = OTHER; note = 2'O-methyl guanosine
  modified_base 4: mod_base = OTHER; note = 2'O-methyl adenosine
  modified_base 5: mod_base = OTHER; note = 2'-fluoro guanosine
  modified_base 6: mod_base = OTHER; note = 2'O-methyl uridine
  modified_base 7: mod_base = OTHER; note = 2'-fluoro cytidine
  modified_base 8: mod_base = OTHER; note = 2'-fluoro guanosine
  modified_base 9: mod_base = OTHER; note = 2'-fluoro uridine
  modified_base 10: mod_base = OTHER; note = 2'O-methyl uridine
  modified_base 11: mod_base = OTHER; note = 2'O-methyl guanosine
  modified_base 12: mod_base = OTHER; note = 2'O-methyl guanosine
  modified_base 13: mod_base = OTHER; note = 2'O-methyl uridine
  modified_base 14: mod_base = OTHER; note = 2'O-methyl guanosine
  modified_base 15: mod_base = OTHER; note = 2'O-methyl adenosine
  modified_base 16: mod_base = OTHER; note = 2'O-methyl adenosine
  modified_base 17: mod_base = OTHER; note = 2'O-methyl guanosine
  modified_base 18: mod_base = OTHER; note = 2'O-methyl uridine
  modified_base 19: mod_base = OTHER; note = 2'O-methyl uridine 6-(5-(((2R,3R,4R,5R,6R)-3-acetamido-4,5-dihydroxy-6-(hydrox ymethyl)tetrahydro-2H-pyran-2-yl)oxy)pentanamido)-N-(6-(4-( hydroxymethyl)-4-(methoxymethyl)piperidin-1-yl)-6-oxohexyl) hexanamide-phosphorothioate-6-(5-(((2R,3R,4R,5R,6R)-3-aceta mido-4,5-dihydroxy-6-(hydroxymethyl)tetrahydro-2H-pyran-2-y l)oxy)pentanamido)-N-(6-(4-(hydroxymethyl)-4-(methoxymethyl )piperidin-1-yl)-6-oxohexyl)hexanamide-phosphorothioate-6-( 5-(((2R,3R,4R,5R,6R)-3-acetamido-4,5-dihydroxy-6-(hydroxyme thyl)tetrahydro-2H-pyran-2-yl)oxy)pentanamido)-N-(6-(4-(hyd roxymethyl)-4-(methoxymethyl)piperidin-1-yl)-6-oxohexyl)hex anamide
tggagtcgttggtgaagtt

SEQ ID NO: 579 - RNA, 21 nt, synthetic construct
  source 1..21: mol_type = other RNA
  modified_base 1: mod_base = OTHER; note = 2'O-methyl cytidine phosphorothioate
  modified_base 2: mod_base = OTHER; note = 2'O-methyl uridine phosphorothioate
  modified_base 3: mod_base = OTHER; note = 2'O-methyl uridine
  modified_base 4: mod_base = OTHER; note = 2'O-methyl guanosine
  modified_base 5: mod_base = OTHER; note = 2'O-methyl guanosine
  modified_base 6: mod_base = OTHER; note = 2'O-methyl adenosine
  modified_base 7: mod_base = OTHER; note = 2'-fluoro guanosine
  modified_base 8: mod_base = OTHER; note = 2'O-methyl uridine
  modified_base 9: mod_base = OTHER; note = 2'-fluoro cytidine
  modified_base 10: mod_base = OTHER; note = 2'-fluoro guanosine
  modified_base 11: mod_base = OTHER; note = 2'-fluoro uridine
  modified_base 12: mod_base = OTHER; note = 2'O-methyl uridine
  modified_base 13: mod_base = OTHER; note = 2'O-methyl guanosine
  modified_base 14: mod_base = OTHER; note = 2'O-methyl guanosine
  modified_base 15: mod_base = OTHER; note = 2'O-methyl uridine
  modified_base 16: mod_base = OTHER; note = 2'O-methyl guanosine
  modified_base 17: mod_base = OTHER; note = 2'O-methyl adenosine
  modified_base 18: mod_base = OTHER; note = 2'O-methyl adenosine
  modified_base 19: mod_base = OTHER; note = 2'O-methyl guanosine
  modified_base 20: mod_base = OTHER; note = 2'O-methyl uridine
  modified_base 21: mod_base = OTHER; note = 2'O-methyl uridine 6-(5-(((2R,3R,4R,5R,6R)-3-acetamido-4,5-dihydroxy-6-(hydrox ymethyl)tetrahydro-2H-pyran-2-yl)oxy)pentanamido)-N-(6-(4-( hydroxymethyl)-4-(methoxymethyl)piperidin-1-yl)-6-oxohexyl) hexanamide-phosphorothioate-6-(5-(((2R,3R,4R,5R,6R)-3-aceta mido-4,5-dihydroxy-6-(hydroxymethyl)tetrahydro-2H-pyran-2-y l)oxy)pentanamido)-N-(6-(4-(hydroxymethyl)-4-(methoxymethyl )piperidin-1-yl)-6-oxohexyl)hexanamide-phosphorothioate-6-( 5-(((2R,3R,4R,5R,6R)-3-acetamido-4,5-dihydroxy-6-(hydroxyme thyl)tetrahydro-2H-pyran-2-yl)oxy)pentanamido)-N-(6-(4-(hyd roxymethyl)-4-(methoxymethyl)piperidin-1-yl)-6-oxohexyl)hex anamide
cttggagtcgttggtgaagtt

SEQ ID NO: 580 - RNA, 21 nt, synthetic construct
  source 1..21: mol_type = other RNA
  modified_base 1: mod_base = OTHER; note = 2'O-methyl cytidine phosphorothioate
  modified_base 2: mod_base = OTHER; note = 2'O-methyl uridine phosphorothioate
  modified_base 3: mod_base = OTHER; note = 2'O-methyl uridine
  modified_base 4: mod_base = OTHER; note = 2'O-methyl guanosine
  modified_base 5: mod_base = OTHER; note = 2'O-methyl guanosine
  modified_base 6: mod_base = OTHER; note = 2'O-methyl adenosine
  modified_base 7: mod_base = OTHER; note = 2'-fluoro guanosine
  modified_base 8: mod_base = OTHER; note = 2'O-methyl uridine
  modified_base 9: mod_base = OTHER; note = 2'-fluoro cytidine
  modified_base 10: mod_base = OTHER; note = 2'-fluoro guanosine
  modified_base 11: mod_base = OTHER; note = 2'-fluoro uridine
  modified_base 12: mod_base = OTHER; note = 2'O-methyl uridine
  modified_base 13: mod_base = OTHER; note = 2'O-methyl guanosine
  modified_base 14: mod_base = OTHER; note = 2'O-methyl guanosine
  modified_base 15: mod_base = OTHER; note = 2'O-methyl uridine
  modified_base 16: mod_base = OTHER; note = 2'O-methyl guanosine
  modified_base 17: mod_base = OTHER; note = 2'O-methyl adenosine
  modified_base 18: mod_base = OTHER; note = 2'O-methyl adenosine
  modified_base 19: mod_base = OTHER; note = 2'O-methyl guanosine
  modified_base 20: mod_base = OTHER; note = 2'O-methyl uridine
  modified_base 21: mod_base = OTHER; note = 2'O-methyl uridine 6-(5-(((2R,3R,4R,5R,6R)-3-acetamido-4,5-dihydroxy-6-(hydrox ymethyl)tetrahydro-2H-pyran-2-yl)oxy)pentanamido)-N-(6-(4-( hydroxymethyl)-4-(methoxymethyl)piperidin-1-yl)-6-oxohexyl) hexanamide-phosphorothioate-6-(5-(((2R,3R,4R,5R,6R)-3-aceta mido-4,5-dihydroxy-6-(hydroxymethyl)tetrahydro-2H-pyran-2-y l)oxy)pentanamido)-N-(6-(4-(hydroxymethyl)-4-(methoxymethyl )piperidin-1-yl)-6-oxohexyl)hexanamide-phosphorothioate-6-( 5-(((2R,3R,4R,5R,6R)-3-acetamido-4,5-dihydroxy-6-(hydroxyme thyl)tetrahydro-2H-pyran-2-yl)oxy)pentanamido)-N-(6-(4-(hyd roxymethyl)-4-(methoxymethyl)piperidin-1-yl)-6-oxohexyl)hex anamide
cttggagtcgttggtgaagtt

SEQ ID NO: 581 - RNA, 21 nt, synthetic construct
  source 1..21: mol_type = other RNA
  modified_base 1: mod_base = OTHER; note = 2'O-methyl uridine phosphorothioate
  modified_base 2: mod_base = OTHER; note = 2'O-methyl guanosine phosphorothioate
  modified_base 3: mod_base = OTHER; note = 2'O-methyl guanosine
  modified_base 4: mod_base = OTHER; note = 2'O-methyl adenosine
  modified_base 5: mod_base = OTHER; note = 2'O-methyl guanosine
  modified_base 6: mod_base = OTHER; note = 2'O-methyl uridine
  modified_base 7: mod_base = OTHER; note = 2'-fluoro cytidine
  modified_base 8: mod_base = OTHER; note = 2'O-methyl guanosine
  modified_base 9: mod_base = OTHER; note = 2'-fluoro uridine
  modified_base 10: mod_base = OTHER; note = 2'-fluoro uridine
  modified_base 11: mod_base = OTHER; note = 2'-fluoro guanosine
  modified_base 12: mod_base = OTHER; note = 2'O-methyl guanosine
  modified_base 13: mod_base = OTHER; note = 2'O-methyl uridine
  modified_base 14: mod_base = OTHER; note = 2'O-methyl guanosine
  modified_base 15: mod_base = OTHER; note = 2'O-methyl adenosine
  modified_base 16: mod_base = OTHER; note = 2'O-methyl adenosine
  modified_base 17: mod_base = OTHER; note = 2'O-methyl guanosine
  modified_base 18: mod_base = OTHER; note = 2'O-methyl uridine
  modified_base 19: mod_base = OTHER; note = 2'O-methyl uridine
  modified_base 20: mod_base = OTHER; note = 2'O-methyl uridine phosphorothioate
  modified_base 21: mod_base = OTHER; note = 2'O-methyl uridine 6-(5-(((2R,3R,4R,5R,6R)-3-acetamido-4,5-dihydroxy-6-(hydrox ymethyl)tetrahydro-2H-pyran-2-yl)oxy)pentanamido)-N-(6-(4-( hydroxymethyl)-4-(methoxymethyl)piperidin-1-yl)-6-oxohexyl) hexanamide-phosphorothioate-6-(5-(((2R,3R,4R,5R,6R)-3-aceta mido-4,5-dihydroxy-6-(hydroxymethyl)tetrahydro-2H-pyran-2-y l)oxy)pentanamido)-N-(6-(4-(hydroxymethyl)-4-(methoxymethyl )piperidin-1-yl)-6-oxohexyl)hexanamide-phosphorothioate-6-( 5-(((2R,3R,4R,5R,6R)-3-acetamido-4,5-dihydroxy-6-(hydroxyme thyl)tetrahydro-2H-pyran-2-yl)oxy)pentanamido)-N-(6-(4-(hyd roxymethyl)-4-(methoxymethyl)piperidin-1-yl)-6-oxohexyl)hex anamide
tggagtcgttggtgaagtttt

SEQ ID NO: 582 - RNA, 19 nt, synthetic construct
  source 1..19: mol_type = other RNA
  modified_base 1: mod_base = OTHER; note = 2'O-methyl guanosine phosphorothioate
  modified_base 2: mod_base = OTHER; note = 2'O-methyl guanosine phosphorothioate
  modified_base 3: mod_base = OTHER; note = 2'O-methyl uridine
  modified_base 4: mod_base = OTHER; note = 2'O-methyl guanosine
  modified_base 5: mod_base = OTHER; note = 2'-fluoro adenosine
  modified_base 6: mod_base = OTHER; note = 2'O-methyl adenosine
  modified_base 7: mod_base = OTHER; note = 2'-fluoro guanosine
  modified_base 8: mod_base = OTHER; note = 2'-fluoro uridine
  modified_base 9: mod_base = OTHER; note = 2'-fluoro uridine
  modified_base 10: mod_base = OTHER; note = 2'O-methyl uridine
  modified_base 11: mod_base = OTHER; note = 2'O-methyl uridine
  modified_base 12: mod_base = OTHER; note = 2'O-methyl uridine
  modified_base 13: mod_base = OTHER; note = 2'O-methyl cytidine
  modified_base 14: mod_base = OTHER; note = 2'O-methyl adenosine
  modified_base 15: mod_base = OTHER; note = 2'O-methyl uridine
  modified_base 16: mod_base = OTHER; note = 2'O-methyl uridine
  modified_base 17: mod_base = OTHER; note = 2'O-methyl cytidine
  modified_base 18: mod_base = OTHER; note = 2'O-methyl cytidine
  modified_base 19: mod_base = OTHER; note = 2'O-methyl uridine 6-(5-(((2R,3R,4R,5R,6R)-3-acetamido-4,5-dihydroxy-6-(hydrox ymethyl)tetrahydro-2H-pyran-2-yl)oxy)pentanamido)-N-(6-(4-( hydroxymethyl)-4-(methoxymethyl)piperidin-1-yl)-6-oxohexyl) hexanamide-phosphorothioate-6-(5-(((2R,3R,4R,5R,6R)-3-aceta mido-4,5-dihydroxy-6-(hydroxymethyl)tetrahydro-2H-pyran-2-y l)oxy)pentanamido)-N-(6-(4-(hydroxymethyl)-4-(methoxymethyl )piperidin-1-yl)-6-oxohexyl)hexanamide-phosphorothioate-6-( 5-(((2R,3R,4R,5R,6R)-3-acetamido-4,5-dihydroxy-6-(hydroxyme thyl)tetrahydro-2H-pyran-2-yl)oxy)pentanamido)-N-(6-(4-(hyd roxymethyl)-4-(methoxymethyl)piperidin-1-yl)-6-oxohexyl)hex anamide
ggtgaagtttttcattcct

SEQ ID NO: 583 - RNA, 19 nt, synthetic construct
  source 1..19: mol_type = other RNA
  modified_base 1: mod_base = OTHER; note = 2'O-methyl guanosine phosphorothioate
  modified_base 2: mod_base = OTHER; note = 2'O-methyl guanosine phosphorothioate
  modified_base 3: mod_base = OTHER; note = 2'O-methyl uridine
  modified_base 4: mod_base = OTHER; note = 2'O-methyl guanosine
  modified_base 5: mod_base = OTHER; note = 2'-fluoro adenosine
  modified_base 6: mod_base = OTHER; note = 2'O-methyl adenosine
  modified_base 7: mod_base = OTHER; note = 2'-fluoro guanosine
  modified_base 8: mod_base = OTHER; note = 2'-fluoro uridine
  modified_base 9: mod_base = OTHER; note = 2'-fluoro uridine
  modified_base 10: mod_base = OTHER; note = 2'O-methyl uridine
  modified_base 11: mod_base = OTHER; note = 2'O-methyl uridine
  modified_base 12: mod_base = OTHER; note = 2'O-methyl uridine
  modified_base 13: mod_base = OTHER; note = 2'O-methyl cytidine
  modified_base 14: mod_base = OTHER; note = 2'O-methyl adenosine
  modified_base 15: mod_base = OTHER; note = 2'O-methyl uridine
  modified_base 16: mod_base = OTHER; note = 2'O-methyl uridine
  modified_base 17: mod_base = OTHER; note = 2'O-methyl cytidine
  modified_base 18: mod_base = OTHER; note = 2'O-methyl cytidine
  modified_base 19: mod_base = OTHER; note = 2'O-methyl uridine 6-(5-(((2R,3R,4R,5R,6R)-3-acetamido-4,5-dihydroxy-6-(hydrox ymethyl)tetrahydro-2H-pyran-2-yl)oxy)pentanamido)-N-(6-(4-( hydroxymethyl)-4-(methoxymethyl)piperidin-1-yl)-6-oxohexyl) hexanamide-phosphorothioate-6-(5-(((2R,3R,4R,5R,6R)-3-aceta mido-4,5-dihydroxy-6-(hydroxymethyl)tetrahydro-2H-pyran-2-y l)oxy)pentanamido)-N-(6-(4-(hydroxymethyl)-4-(methoxymethyl )piperidin-1-yl)-6-oxohexyl)hexanamide-phosphorothioate-6-( 5-(((2R,3R,4R,5R,6R)-3-acetamido-4,5-dihydroxy-6-(hydroxyme thyl)tetrahydro-2H-pyran-2-yl)oxy)pentanamido)-N-(6-(4-(hyd roxymethyl)-4-(methoxymethyl)piperidin-1-yl)-6-oxohexyl)hex anamide
ggtgaagtttttcattcct

SEQ ID NO: 584 - RNA, 21 nt, synthetic construct
  source 1..21: mol_type = other RNA
  modified_base 1: mod_base = OTHER; note = 2'O-methyl uridine phosphorothioate
  modified_base 2: mod_base = OTHER; note = 2'O-methyl uridine phosphorothioate
  modified_base 3: mod_base = OTHER; note = 2'O-methyl guanosine
  modified_base 4: mod_base = OTHER; note = 2'O-methyl guanosine
  modified_base 5: mod_base = OTHER; note = 2'O-methyl uridine
  modified_base 6: mod_base = OTHER; note = 2'O-methyl guanosine
  modified_base 7: mod_base = OTHER; note = 2'-fluoro adenosine
  modified_base 8: mod_base = OTHER; note = 2'O-methyl adenosine
  modified_base 9: mod_base = OTHER; note = 2'-fluoro guanosine
  modified_base 10: mod_base = OTHER; note = 2'-fluoro uridine
  modified_base 11: mod_base = OTHER; note = 2'-fluoro uridine
  modified_base 12: mod_base = OTHER; note = 2'O-methyl uridine
  modified_base 13: mod_base = OTHER; note = 2'O-methyl uridine
  modified_base 14: mod_base = OTHER; note = 2'O-methyl uridine
  modified_base 15: mod_base = OTHER; note = 2'O-methyl cytidine
  modified_base 16: mod_base = OTHER; note = 2'O-methyl adenosine
  modified_base 17: mod_base = OTHER; note = 2'O-methyl uridine
  modified_base 18: mod_base = OTHER; note = 2'O-methyl uridine
  modified_base 19: mod_base = OTHER; note = 2'O-methyl cytidine
  modified_base 20: mod_base = OTHER; note = 2'O-methyl cytidine
  modified_base 21: mod_base = OTHER; note = 2'O-methyl uridine 6-(5-(((2R,3R,4R,5R,6R)-3-acetamido-4,5-dihydroxy-6-(hydrox ymethyl)tetrahydro-2H-pyran-2-yl)oxy)pentanamido)-N-(6-(4-( hydroxymethyl)-4-(methoxymethyl)piperidin-1-yl)-6-oxohexyl) hexanamide-phosphorothioate-6-(5-(((2R,3R,4R,5R,6R)-3-aceta mido-4,5-dihydroxy-6-(hydroxymethyl)tetrahydro-2H-pyran-2-y l)oxy)pentanamido)-N-(6-(4-(hydroxymethyl)-4-(methoxymethyl )piperidin-1-yl)-6-oxohexyl)hexanamide-phosphorothioate-6-( 5-(((2R,3R,4R,5R,6R)-3-acetamido-4,5-dihydroxy-6-(hydroxyme thyl)tetrahydro-2H-pyran-2-yl)oxy)pentanamido)-N-(6-(4-(hyd roxymethyl)-4-(methoxymethyl)piperidin-1-yl)-6-oxohexyl)hex anamide
ttggtgaagtttttcattcct

SEQ ID NO: 585 - RNA, 21 nt, synthetic construct
  source 1..21: mol_type = other RNA
  modified_base 1: mod_base = OTHER; note = 2'O-methyl uridine phosphorothioate
  modified_base 2: mod_base = OTHER; note = 2'O-methyl uridine phosphorothioate
  modified_base 3: mod_base = OTHER; note = 2'O-methyl guanosine
  modified_base 4: mod_base = OTHER; note = 2'O-methyl guanosine
  modified_base 5: mod_base = OTHER; note = 2'O-methyl uridine
  modified_base 6: mod_base = OTHER; note = 2'O-methyl guanosine
  modified_base 7: mod_base = OTHER; note = 2'-fluoro adenosine
  modified_base 8: mod_base = OTHER; note = 2'O-methyl adenosine
  modified_base 9: mod_base = OTHER; note = 2'-fluoro guanosine
  modified_base 10: mod_base = OTHER; note = 2'-fluoro uridine
  modified_base 11: mod_base = OTHER; note = 2'-fluoro uridine
  modified_base 12: mod_base = OTHER; note = 2'O-methyl uridine
  modified_base 13: mod_base = OTHER; note = 2'O-methyl uridine
  modified_base 14: mod_base = OTHER; note = 2'O-methyl uridine
  modified_base 15: mod_base = OTHER; note = 2'O-methyl cytidine
  modified_base 16: mod_base = OTHER; note = 2'O-methyl adenosine
  modified_base 17: mod_base = OTHER; note = 2'O-methyl uridine
  modified_base 18: mod_base = OTHER; note = 2'O-methyl uridine
  modified_base 19: mod_base = OTHER; note = 2'O-methyl cytidine
  modified_base 20: mod_base = OTHER; note = 2'O-methyl cytidine
  modified_base 21: mod_base = OTHER; note = 2'O-methyl uridine 6-(5-(((2R,3R,4R,5R,6R)-3-acetamido-4,5-dihydroxy-6-(hydrox ymethyl)tetrahydro-2H-pyran-2-yl)oxy)pentanamido)-N-(6-(4-( hydroxymethyl)-4-(methoxymethyl)piperidin-1-yl)-6-oxohexyl) hexanamide-phosphorothioate-6-(5-(((2R,3R,4R,5R,6R)-3-aceta mido-4,5-dihydroxy-6-(hydroxymethyl)tetrahydro-2H-pyran-2-y l)oxy)pentanamido)-N-(6-(4-(hydroxymethyl)-4-(methoxymethyl )piperidin-1-yl)-6-oxohexyl)hexanamide-phosphorothioate-6-( 5-(((2R,3R,4R,5R,6R)-3-acetamido-4,5-dihydroxy-6-(hydroxyme thyl)tetrahydro-2H-pyran-2-yl)oxy)pentanamido)-N-(6-(4-(hyd roxymethyl)-4-(methoxymethyl)piperidin-1-yl)-6-oxohexyl)hex anamide
ttggtgaagtttttcattcct

SEQ ID NO: 586 - RNA, 21 nt, synthetic construct
  source 1..21: mol_type = other RNA
  modified_base 1: mod_base = OTHER; note = 2'O-methyl uridine phosphorothioate
  modified_base 2: mod_base = OTHER; note = 2'O-methyl adenosine phosphorothioate
  modified_base 3: mod_base = OTHER; note = 2'O-methyl uridine
  modified_base 4: mod_base = OTHER; note = 2'O-methyl uridine
  modified_base 5: mod_base = OTHER; note = 2'O-methyl guanosine
  modified_base 6: mod_base = OTHER; note = 2'O-methyl guanosine
  modified_base 7: mod_base = OTHER; note = 2'-fluoro uridine
  modified_base 8: mod_base = OTHER; note = 2'O-methyl uridine
  modified_base 9: mod_base = OTHER; note = 2'-fluoro cytidine
  modified_base 10: mod_base = OTHER; note = 2'-fluoro uridine
  modified_base 11: mod_base = OTHER; note = 2'-fluoro guanosine
  modified_base 12: mod_base = OTHER; note = 2'O-methyl uridine
  modified_base 13: mod_base = OTHER; note = 2'O-methyl guanosine
  modified_base 14: mod_base = OTHER; note = 2'O-methyl guanosine
  modified_base 15: mod_base = OTHER; note = 2'O-methyl guanosine
  modified_base 16: mod_base = OTHER; note = 2'O-methyl adenosine
  modified_base 17: mod_base = OTHER; note = 2'O-methyl uridine
  modified_base 18: mod_base = OTHER; note = 2'O-methyl adenosine
  modified_base 19: mod_base = OTHER; note = 2'O-methyl uridine
  modified_base 20: mod_base = OTHER; note = 2'O-methyl uridine
  modified_base 21: mod_base = OTHER; note = 2'O-methyl adenosine 6-(5-(((2R,3R,4R,5R,6R)-3-acetamido-4,5-dihydroxy-6-(hydrox ymethyl)tetrahydro-2H-pyran-2-yl)oxy)pentanamido)-N-(6-(4-( hydroxymethyl)-4-(methoxymethyl)piperidin-1-yl)-6-oxohexyl) hexanamide-phosphorothioate-6-(5-(((2R,3R,4R,5R,6R)-3-aceta mido-4,5-dihydroxy-6-(hydroxymethyl)tetrahydro-2H-pyran-2-y l)oxy)pentanamido)-N-(6-(4-(hydroxymethyl)-4-(methoxymethyl )piperidin-1-yl)-6-oxohexyl)hexanamide-phosphorothioate-6-( 5-(((2R,3R,4R,5R,6R)-3-acetamido-4,5-dihydroxy-6-(hydroxyme thyl)tetrahydro-2H-pyran-2-yl)oxy)pentanamido)-N-(6-(4-(hyd roxymethyl)-4-(methoxymethyl)piperidin-1-yl)-6-oxohexyl)hex anamide
tattggttctgtgggatatta

SEQ ID NO: 587 - RNA, 21 nt, synthetic construct
  source 1..21: mol_type = other RNA
  modified_base 1: mod_base = OTHER; note = 2'O-methyl uridine phosphorothioate
  modified_base 2: mod_base = OTHER; note = 2'O-methyl adenosine phosphorothioate
  modified_base 3: mod_base = OTHER; note = 2'O-methyl uridine
  modified_base 4: mod_base = OTHER; note = 2'O-methyl uridine
  modified_base 5: mod_base = OTHER; note = 2'O-methyl guanosine
  modified_base 6: mod_base = OTHER; note = 2'O-methyl guanosine
  modified_base 7: mod_base = OTHER; note = 2'-fluoro uridine
  modified_base 8: mod_base = OTHER; note = 2'O-methyl uridine
  modified_base 9: mod_base = OTHER; note = 2'-fluoro cytidine
  modified_base 10: mod_base = OTHER; note = 2'-fluoro uridine
  modified_base 11: mod_base = OTHER; note = 2'-fluoro guanosine
  modified_base 12: mod_base = OTHER; note = 2'O-methyl uridine
  modified_base 13: mod_base = OTHER; note = 2'O-methyl guanosine
  modified_base 14: mod_base = OTHER; note = 2'O-methyl guanosine
  modified_base 15: mod_base = OTHER; note = 2'O-methyl guanosine
  modified_base 16: mod_base = OTHER; note = 2'O-methyl adenosine
  modified_base 17: mod_base = OTHER; note = 2'O-methyl uridine
  modified_base 18: mod_base = OTHER; note = 2'O-methyl adenosine
  modified_base 19: mod_base = OTHER; note = 2'O-methyl uridine
  modified_base 20: mod_base = OTHER; note = 2'O-methyl uridine
  modified_base 21: mod_base = OTHER; note = 2'O-methyl adenosine 6-(5-(((2R,3R,4R,5R,6R)-3-acetamido-4,5-dihydroxy-6-(hydrox ymethyl)tetrahydro-2H-pyran-2-yl)oxy)pentanamido)-N-(6-(4-( hydroxymethyl)-4-(methoxymethyl)piperidin-1-yl)-6-oxohexyl) hexanamide-phosphorothioate-6-(5-(((2R,3R,4R,5R,6R)-3-aceta mido-4,5-dihydroxy-6-(hydroxymethyl)tetrahydro-2H-pyran-2-y l)oxy)pentanamido)-N-(6-(4-(hydroxymethyl)-4-(methoxymethyl )piperidin-1-yl)-6-oxohexyl)hexanamide-phosphorothioate-6-( 5-(((2R,3R,4R,5R,6R)-3-acetamido-4,5-dihydroxy-6-(hydroxyme thyl)tetrahydro-2H-pyran-2-yl)oxy)pentanamido)-N-(6-(4-(hyd roxymethyl)-4-(methoxymethyl)piperidin-1-yl)-6-oxohexyl)hex anamide
tattggttctgtgggatatta

SEQ ID NO: 588 - RNA, 21 nt, synthetic construct
  source 1..21: mol_type = other RNA
  modified_base 1: mod_base = OTHER; note = 2'O-methyl uridine phosphorothioate
  modified_base 2: mod_base = OTHER; note = 2'O-methyl adenosine phosphorothioate
  modified_base 3: mod_base = OTHER; note = 2'O-methyl uridine
  modified_base 4: mod_base = OTHER; note = 2'O-methyl uridine
  modified_base 5: mod_base = OTHER; note = 2'O-methyl guanosine
  modified_base 6: mod_base = OTHER; note = 2'O-methyl guanosine
  modified_base 7: mod_base = OTHER; note = 2'-fluoro uridine
  modified_base 8: mod_base = OTHER; note = 2'O-methyl uridine
  modified_base 9: mod_base = OTHER; note = 2'-fluoro cytidine
  modified_base 10: mod_base = OTHER; note = 2'-fluoro uridine
  modified_base 11: mod_base = OTHER; note = 2'-fluoro guanosine
  modified_base 12: mod_base = OTHER; note = 2'O-methyl uridine
  modified_base 13: mod_base = OTHER; note = 2'O-methyl guanosine
  modified_base 14: mod_base = OTHER; note = 2'O-methyl guanosine
  modified_base 15: mod_base = OTHER; note = 2'O-methyl guanosine
  modified_base 16: mod_base = OTHER; note = 2'O-methyl adenosine
  modified_base 17: mod_base = OTHER; note = 2'O-methyl uridine
  modified_base 18: mod_base = OTHER; note = 2'O-methyl adenosine
  modified_base 19: mod_base = OTHER; note = 2'O-methyl uridine
  modified_base 20: mod_base = OTHER; note = 2'O-methyl uridine
  modified_base 21: mod_base = OTHER; note = 2'O-methyl adenosine 6-(5-(((2R,3R,4R,5R,6R)-3-acetamido-4,5-dihydroxy-6-(hydrox ymethyl)tetrahydro-2H-pyran-2-yl)oxy)pentanamido)-N-(6-(4-( hydroxymethyl)-4-(methoxymethyl)piperidin-1-yl)-6-oxohexyl) hexanamide-phosphorothioate-6-(5-(((2R,3R,4R,5R,6R)-3-aceta mido-4,5-dihydroxy-6-(hydroxymethyl)tetrahydro-2H-pyran-2-y l)oxy)pentanamido)-N-(6-(4-(hydroxymethyl)-4-(methoxymethyl )piperidin-1-yl)-6-oxohexyl)hexanamide-phosphorothioate-6-( 5-(((2R,3R,4R,5R,6R)-3-acetamido-4,5-dihydroxy-6-(hydroxyme thyl)tetrahydro-2H-pyran-2-yl)oxy)pentanamido)-N-(6-(4-(hyd roxymethyl)-4-(methoxymethyl)piperidin-1-yl)-6-oxohexyl)hex anamide
tattggttctgtgggatatta

SEQ ID NO: 589 - RNA, 21 nt, synthetic construct
  source 1..21: mol_type = other RNA
  modified_base 1: mod_base = OTHER; note = 2'O-methyl uridine phosphorothioate
  modified_base 2: mod_base = OTHER; note = 2'O-methyl uridine phosphorothioate
  modified_base 3: mod_base = OTHER; note = 2'O-methyl guanosine
  modified_base 4: mod_base = OTHER; note = 2'O-methyl guanosine
  modified_base 5: mod_base = OTHER; note = 2'O-methyl guanosine
  modified_base 6: mod_base = OTHER; note = 2'O-methyl adenosine
  modified_base 7: mod_base = OTHER; note = 2'-fluoro adenosine
  modified_base 8: mod_base = OTHER; note = 2'O-methyl adenosine
  modified_base 9: mod_base = OTHER; note = 2'-fluoro adenosine
  modified_base 10: mod_base = OTHER; note = 2'-fluoro adenosine
  modified_base 11: mod_base = OTHER; note = 2'-fluoro cytidine
  modified_base 12: mod_base = OTHER; note = 2'O-methyl uridine
  modified_base 13: mod_base = OTHER; note = 2'O-methyl guanosine
  modified_base 14: mod_base = OTHER; note = 2'O-methyl guanosine
  modified_base 15: mod_base = OTHER; note = 2'O-methyl uridine
  modified_base 16: mod_base = OTHER; note = 2'O-methyl adenosine
  modified_base 17: mod_base = OTHER; note = 2'O-methyl uridine
  modified_base 18: mod_base = OTHER; note = 2'O-methyl cytidine
  modified_base 19: mod_base = OTHER; note = 2'O-methyl adenosine
  modified_base 20: mod_base = OTHER; note = 2'O-methyl adenosine
  modified_base 21: mod_base = OTHER; note = 2'O-methyl adenosine 6-(5-(((2R,3R,4R,5R,6R)-3-acetamido-4,5-dihydroxy-6-(hydrox ymethyl)tetrahydro-2H-pyran-2-yl)oxy)pentanamido)-N-(6-(4-( hydroxymethyl)-4-(methoxymethyl)piperidin-1-yl)-6-oxohexyl) hexanamide-phosphorothioate-6-(5-(((2R,3R,4R,5R,6R)-3-aceta mido-4,5-dihydroxy-6-(hydroxymethyl)tetrahydro-2H-pyran-2-y l)oxy)pentanamido)-N-(6-(4-(hydroxymethyl)-4-(methoxymethyl )piperidin-1-yl)-6-oxohexyl)hexanamide-phosphorothioate-6-( 5-(((2R,3R,4R,5R,6R)-3-acetamido-4,5-dihydroxy-6-(hydroxyme thyl)tetrahydro-2H-pyran-2-yl)oxy)pentanamido)-N-(6-(4-(hyd roxymethyl)-4-(methoxymethyl)piperidin-1-yl)-6-oxohexyl)hex anamide
ttgggaaaaactggtatcaaa

SEQ ID NO: 590 - RNA, 21 nt, synthetic construct
  source 1..21: mol_type = other RNA
  modified_base 1: mod_base = OTHER; note = 2'O-methyl uridine phosphorothioate
  modified_base 2: mod_base = OTHER; note = 2'O-methyl uridine phosphorothioate
  modified_base 3: mod_base = OTHER; note = 2'O-methyl guanosine
  modified_base 4: mod_base = OTHER; note = 2'O-methyl guanosine
  modified_base 5: mod_base = OTHER; note = 2'O-methyl guanosine
  modified_base 6: mod_base = OTHER; note = 2'O-methyl adenosine
  modified_base 7: mod_base = OTHER; note = 2'-fluoro adenosine
  modified_base 8: mod_base = OTHER; note = 2'O-methyl adenosine
  modified_base 9: mod_base = OTHER; note = 2'-fluoro adenosine
  modified_base 10: mod_base = OTHER; note = 2'-fluoro adenosine
  modified_base 11: mod_base = OTHER; note = 2'-fluoro cytidine
  modified_base 12: mod_base = OTHER; note = 2'O-methyl uridine
  modified_base 13: mod_base = OTHER; note = 2'O-methyl guanosine
  modified_base 14: mod_base = OTHER; note = 2'O-methyl guanosine
  modified_base 15: mod_base = OTHER; note = 2'O-methyl uridine
  modified_base 16: mod_base = OTHER; note = 2'O-methyl adenosine
  modified_base 17: mod_base = OTHER; note = 2'O-methyl uridine
  modified_base 18: mod_base = OTHER; note = 2'O-methyl cytidine
  modified_base 19: mod_base = OTHER; note = 2'O-methyl adenosine
  modified_base 20: mod_base = OTHER; note = 2'O-methyl adenosine
  modified_base 21: mod_base = OTHER; note = 2'O-methyl adenosine 6-(5-(((2R,3R,4R,5R,6R)-3-acetamido-4,5-dihydroxy-6-(hydrox ymethyl)tetrahydro-2H-pyran-2-yl)oxy)pentanamido)-N-(6-(4-( hydroxymethyl)-4-(methoxymethyl)piperidin-1-yl)-6-oxohexyl) hexanamide-phosphorothioate-6-(5-(((2R,3R,4R,5R,6R)-3-aceta mido-4,5-dihydroxy-6-(hydroxymethyl)tetrahydro-2H-pyran-2-y l)oxy)pentanamido)-N-(6-(4-(hydroxymethyl)-4-(methoxymethyl )piperidin-1-yl)-6-oxohexyl)hexanamide-phosphorothioate-6-( 5-(((2R,3R,4R,5R,6R)-3-acetamido-4,5-dihydroxy-6-(hydroxyme thyl)tetrahydro-2H-pyran-2-yl)oxy)pentanamido)-N-(6-(4-(hyd roxymethyl)-4-(methoxymethyl)piperidin-1-yl)-6-oxohexyl)hex anamide
ttgggaaaaactggtatcaaa

SEQ ID NO: 591 - RNA, 21 nt, synthetic construct
  source 1..21: mol_type = other RNA
  modified_base 1: mod_base = OTHER; note = 2'O-methyl uridine phosphorothioate
  modified_base 2: mod_base = OTHER; note = 2'O-methyl uridine phosphorothioate
  modified_base 3: mod_base = OTHER; note = 2'O-methyl guanosine
  modified_base 4: mod_base = OTHER; note = 2'O-methyl guanosine
  modified_base 5: mod_base = OTHER; note = 2'O-methyl guanosine
  modified_base 6: mod_base = OTHER; note = 2'O-methyl adenosine
  modified_base 7: mod_base = OTHER; note = 2'-fluoro adenosine
  modified_base 8: mod_base = OTHER; note = 2'O-methyl adenosine
  modified_base 9: mod_base = OTHER; note = 2'-fluoro adenosine
  modified_base 10: mod_base = OTHER; note = 2'-fluoro adenosine
  modified_base 11: mod_base = OTHER; note = 2'-fluoro cytidine
  modified_base 12: mod_base = OTHER; note = 2'O-methyl uridine
  modified_base 13: mod_base = OTHER; note = 2'O-methyl guanosine
  modified_base 14: mod_base = OTHER; note = 2'O-methyl guanosine
  modified_base 15: mod_base = OTHER; note = 2'O-methyl uridine
  modified_base 16: mod_base = OTHER; note = 2'O-methyl adenosine
  modified_base 17: mod_base = OTHER; note = 2'O-methyl uridine
  modified_base 18: mod_base = OTHER; note = 2'O-methyl cytidine
  modified_base 19: mod_base = OTHER; note = 2'O-methyl adenosine
  modified_base 20: mod_base = OTHER; note = 2'O-methyl adenosine
  modified_base 21: mod_base = OTHER; note = 2'O-methyl adenosine 6-(5-(((2R,3R,4R,5R,6R)-3-acetamido-4,5-dihydroxy-6-(hydrox ymethyl)tetrahydro-2H-pyran-2-yl)oxy)pentanamido)-N-(6-(4-( hydroxymethyl)-4-(methoxymethyl)piperidin-1-yl)-6-oxohexyl) hexanamide-phosphorothioate-6-(5-(((2R,3R,4R,5R,6R)-3-aceta mido-4,5-dihydroxy-6-(hydroxymethyl)tetrahydro-2H-pyran-2-y l)oxy)pentanamido)-N-(6-(4-(hydroxymethyl)-4-(methoxymethyl )piperidin-1-yl)-6-oxohexyl)hexanamide-phosphorothioate-6-( 5-(((2R,3R,4R,5R,6R)-3-acetamido-4,5-dihydroxy-6-(hydroxyme thyl)tetrahydro-2H-pyran-2-yl)oxy)pentanamido)-N-(6-(4-(hyd roxymethyl)-4-(methoxymethyl)piperidin-1-yl)-6-oxohexyl)hex anamide
ttgggaaaaactggtatcaaa

SEQ ID NO: 592 - RNA, 21 nt, synthetic construct
  source 1..21: mol_type = other RNA
  modified_base 1: mod_base = OTHER; note = 2'O-methyl adenosine phosphorothioate
  modified_base 2: mod_base = OTHER; note = 2'O-methyl cytidine phosphorothioate
  modified_base 3: mod_base = OTHER; note = 2'O-methyl cytidine
  modified_base 4: mod_base = OTHER; note = 2'O-methyl adenosine
  modified_base 5: mod_base = OTHER; note = 2'O-methyl adenosine
  modified_base 6: mod_base = OTHER; note = 2'O-methyl uridine
  modified_base 7: mod_base = OTHER; note = 2'-fluoro adenosine
  modified_base 8: mod_base = OTHER; note = 2'O-methyl adenosine
  modified_base 9: mod_base = OTHER; note = 2'-fluoro guanosine
  modified_base 10: mod_base = OTHER; note = 2'-fluoro adenosine
  modified_base 11: mod_base = OTHER; note = 2'-fluoro adenosine
  modified_base 12: mod_base = OTHER; note = 2'O-methyl adenosine
  modified_base 13: mod_base = OTHER; note = 2'O-methyl adenosine
  modified_base 14: mod_base = OTHER; note = 2'O-methyl uridine
  modified_base 15: mod_base = OTHER; note = 2'O-methyl guanosine
  modified_base 16: mod_base = OTHER; note = 2'O-methyl adenosine
  modified_base 17: mod_base = OTHER; note = 2'O-methyl uridine
  modified_base 18: mod_base = OTHER; note = 2'O-methyl uridine
  modified_base 19: mod_base = OTHER; note = 2'O-methyl uridine
  modified_base 20: mod_base = OTHER; note = 2'O-methyl uridine
  modified_base 21: mod_base = OTHER; note = 2'O-methyl uridine 6-(5-(((2R,3R,4R,5R,6R)-3-acetamido-4,5-dihydroxy-6-(hydrox ymethyl)tetrahydro-2H-pyran-2-yl)oxy)pentanamido)-N-(6-(4-( hydroxymethyl)-4-(methoxymethyl)piperidin-1-yl)-6-oxohexyl) hexanamide-phosphorothioate-6-(5-(((2R,3R,4R,5R,6R)-3-aceta mido-4,5-dihydroxy-6-(hydroxymethyl)tetrahydro-2H-pyran-2-y l)oxy)pentanamido)-N-(6-(4-(hydroxymethyl)-4-(methoxymethyl )piperidin-1-yl)-6-oxohexyl)hexanamide-phosphorothioate-6-( 5-(((2R,3R,4R,5R,6R)-3-acetamido-4,5-dihydroxy-6-(hydroxyme thyl)tetrahydro-2H-pyran-2-yl)oxy)pentanamido)-N-(6-(4-(hyd roxymethyl)-4-(methoxymethyl)piperidin-1-yl)-6-oxohexyl)hex anamide
accaataagaaaatgattttt

SEQ ID NO: 593 - RNA, 21 nt, synthetic construct
  source 1..21: mol_type = other RNA
  modified_base 1: mod_base = OTHER; note = 2'O-methyl adenosine phosphorothioate
  modified_base 2: mod_base = OTHER; note = 2'O-methyl cytidine phosphorothioate
  modified_base 3: mod_base = OTHER; note = 2'O-methyl cytidine
  modified_base 4: mod_base = OTHER; note = 2'O-methyl adenosine
  modified_base 5: mod_base = OTHER; note = 2'O-methyl adenosine
  modified_base 6: mod_base = OTHER; note = 2'O-methyl uridine
  modified_base 7: mod_base = OTHER; note = 2'-fluoro adenosine
  modified_base 8: mod_base = OTHER; note = 2'O-methyl adenosine
  modified_base 9: mod_base = OTHER; note = 2'-fluoro guanosine
  modified_base 10: mod_base = OTHER; note = 2'-fluoro adenosine
  modified_base 11: mod_base = OTHER; note = 2'-fluoro adenosine
  modified_base 12: mod_base = OTHER; note = 2'O-methyl adenosine
  modified_base 13: mod_base = OTHER; note = 2'O-methyl adenosine
  modified_base 14: mod_base = OTHER; note = 2'O-methyl uridine
  modified_base 15: mod_base = OTHER; note = 2'O-methyl guanosine
  modified_base 16: mod_base = OTHER; note = 2'O-methyl adenosine
  modified_base 17: mod_base = OTHER; note = 2'O-methyl uridine
  modified_base 18: mod_base = OTHER; note = 2'O-methyl uridine
  modified_base 19: mod_base = OTHER; note = 2'O-methyl uridine
  modified_base 20: mod_base = OTHER; note = 2'O-methyl uridine
  modified_base 21: mod_base = OTHER; note = 2'O-methyl uridine 6-(5-(((2R,3R,4R,5R,6R)-3-acetamido-4,5-dihydroxy-6-(hydrox ymethyl)tetrahydro-2H-pyran-2-yl)oxy)pentanamido)-N-(6-(4-( hydroxymethyl)-4-(methoxymethyl)piperidin-1-yl)-6-oxohexyl) hexanamide-phosphorothioate-6-(5-(((2R,3R,4R,5R,6R)-3-aceta mido-4,5-dihydroxy-6-(hydroxymethyl)tetrahydro-2H-pyran-2-y l)oxy)pentanamido)-N-(6-(4-(hydroxymethyl)-4-(methoxymethyl )piperidin-1-yl)-6-oxohexyl)hexanamide-phosphorothioate-6-( 5-(((2R,3R,4R,5R,6R)-3-acetamido-4,5-dihydroxy-6-(hydroxyme thyl)tetrahydro-2H-pyran-2-yl)oxy)pentanamido)-N-(6-(4-(hyd roxymethyl)-4-(methoxymethyl)piperidin-1-yl)-6-oxohexyl)hex anamide
accaataagaaaatgattttt

SEQ ID NO: 594 - RNA, 21 nt, synthetic construct
  source 1..21: mol_type = other RNA
  modified_base 1: mod_base = OTHER; note = 2'O-methyl adenosine phosphorothioate
  modified_base 2: mod_base = OTHER; note = 2'O-methyl cytidine phosphorothioate
  modified_base 3: mod_base = OTHER; note = 2'O-methyl cytidine
  modified_base 4: mod_base = OTHER; note = 2'O-methyl adenosine
  modified_base 5: mod_base = OTHER; note = 2'O-methyl adenosine
  modified_base 6: mod_base = OTHER; note = 2'O-methyl uridine
  modified_base 7: mod_base = OTHER; note = 2'-fluoro adenosine
  modified_base 8: mod_base = OTHER; note = 2'O-methyl adenosine
  modified_base 9: mod_base = OTHER; note = 2'-fluoro guanosine
  modified_base 10: mod_base = OTHER; note = 2'-fluoro adenosine
  modified_base 11: mod_base = OTHER; note = 2'-fluoro adenosine
  modified_base 12: mod_base = OTHER; note = 2'O-methyl adenosine
  modified_base 13: mod_base = OTHER; note = 2'O-methyl adenosine
  modified_base 14: mod_base = OTHER; note = 2'O-methyl uridine
  modified_base 15: mod_base = OTHER; note = 2'O-methyl guanosine
  modified_base 16: mod_base = OTHER; note = 2'O-methyl adenosine
  modified_base 17: mod_base = OTHER; note = 2'O-methyl uridine
  modified_base 18: mod_base = OTHER; note = 2'O-methyl uridine
  modified_base 19: mod_base = OTHER; note = 2'O-methyl uridine
  modified_base 20: mod_base = OTHER; note = 2'O-methyl uridine
  modified_base 21: mod_base = OTHER; note = 2'O-methyl uridine 6-(5-(((2R,3R,4R,5R,6R)-3-acetamido-4,5-dihydroxy-6-(hydrox ymethyl)tetrahydro-2H-pyran-2-yl)oxy)pentanamido)-N-(6-(4-( hydroxymethyl)-4-(methoxymethyl)piperidin-1-yl)-6-oxohexyl) hexanamide-phosphorothioate-6-(5-(((2R,3R,4R,5R,6R)-3-aceta mido-4,5-dihydroxy-6-(hydroxymethyl)tetrahydro-2H-pyran-2-y l)oxy)pentanamido)-N-(6-(4-(hydroxymethyl)-4-(methoxymethyl )piperidin-1-yl)-6-oxohexyl)hexanamide-phosphorothioate-6-( 5-(((2R,3R,4R,5R,6R)-3-acetamido-4,5-dihydroxy-6-(hydroxyme thyl)tetrahydro-2H-pyran-2-yl)oxy)pentanamido)-N-(6-(4-(hyd roxymethyl)-4-(methoxymethyl)piperidin-1-yl)-6-oxohexyl)hex anamide
accaataagaaaatgattttt

SEQ ID NO: 595 - RNA, 21 nt, synthetic construct
  source 1..21: mol_type = other RNA
  modified_base 1: mod_base = OTHER; note = 2'O-methyl uridine phosphorothioate
  modified_base 2: mod_base = OTHER; note = 2'O-methyl guanosine phosphorothioate
  modified_base 3: mod_base = OTHER; note = 2'O-methyl guanosine
  modified_base 4: mod_base = OTHER; note = 2'O-methyl uridine
  modified_base 5: mod_base = OTHER; note = 2'O-methyl adenosine
  modified_base 6: mod_base = OTHER; note = 2'O-methyl uridine
  modified_base 7: mod_base = OTHER; note = 2'-fluoro cytidine
  modified_base 8: mod_base = OTHER; note = 2'O-methyl adenosine
  modified_base 9: mod_base = OTHER; note = 2'-fluoro adenosine
  modified_base 10: mod_base = OTHER; note = 2'-fluoro adenosine
  modified_base 11: mod_base = OTHER; note = 2'-fluoro adenosine
  modified_base 12: mod_base = OTHER; note = 2'O-methyl cytidine
  modified_base 13: mod_base = OTHER; note = 2'O-methyl cytidine
  modified_base 14: mod_base = OTHER; note = 2'O-methyl uridine
  modified_base 15: mod_base = OTHER; note = 2'O-methyl cytidine
  modified_base 16: mod_base = OTHER; note = 2'O-methyl adenosine
  modified_base 17: mod_base = OTHER; note = 2'O-methyl uridine
  modified_base 18: mod_base = OTHER; note = 2'O-methyl guanosine
  modified_base 19: mod_base = OTHER; note = 2'O-methyl uridine
  modified_base 20: mod_base = OTHER; note = 2'O-methyl cytidine
  modified_base 21: mod_base = OTHER; note = 2'O-methyl uridine 6-(5-(((2R,3R,4R,5R,6R)-3-acetamido-4,5-dihydroxy-6-(hydrox ymethyl)tetrahydro-2H-pyran-2-yl)oxy)pentanamido)-N-(6-(4-( hydroxymethyl)-4-(methoxymethyl)piperidin-1-yl)-6-oxohexyl) hexanamide-phosphorothioate-6-(5-(((2R,3R,4R,5R,6R)-3-aceta mido-4,5-dihydroxy-6-(hydroxymethyl)tetrahydro-2H-pyran-2-y l)oxy)pentanamido)-N-(6-(4-(hydroxymethyl)-4-(methoxymethyl )piperidin-1-yl)-6-oxohexyl)hexanamide-phosphorothioate-6-( 5-(((2R,3R,4R,5R,6R)-3-acetamido-4,5-dihydroxy-6-(hydroxyme thyl)tetrahydro-2H-pyran-2-yl)oxy)pentanamido)-N-(6-(4-(hyd roxymethyl)-4-(methoxymethyl)piperidin-1-yl)-6-oxohexyl)hex anamide
tggtatcaaaacctcatgtct

SEQ ID NO: 596 - RNA, 21 nt, synthetic construct
  source 1..21: mol_type = other RNA
  modified_base 1: mod_base = OTHER; note = 2'O-methyl uridine phosphorothioate
  modified_base 2: mod_base = OTHER; note = 2'O-methyl guanosine phosphorothioate
  modified_base 3: mod_base = OTHER; note = 2'O-methyl guanosine
  modified_base 4: mod_base = OTHER; note = 2'O-methyl uridine
  modified_base 5: mod_base = OTHER; note = 2'O-methyl adenosine
  modified_base 6: mod_base = OTHER; note = 2'O-methyl uridine
  modified_base 7: mod_base = OTHER; note = 2'-fluoro cytidine
  modified_base 8: mod_base = OTHER; note = 2'O-methyl adenosine
  modified_base 9: mod_base = OTHER; note = 2'-fluoro adenosine
  modified_base 10: mod_base = OTHER; note = 2'-fluoro adenosine
  modified_base 11: mod_base = OTHER; note = 2'-fluoro adenosine
  modified_base 12: mod_base = OTHER; note = 2'O-methyl cytidine
  modified_base 13: mod_base = OTHER; note = 2'O-methyl cytidine
  modified_base 14: mod_base = OTHER; note = 2'O-methyl uridine
  modified_base 15: mod_base = OTHER; note = 2'O-methyl cytidine
  modified_base 16: mod_base = OTHER; note = 2'O-methyl adenosine
  modified_base 17: mod_base = OTHER; note = 2'O-methyl uridine
  modified_base 18: mod_base = OTHER; note = 2'O-methyl guanosine
  modified_base 19: mod_base = OTHER; note = 2'O-methyl uridine
  modified_base 20: mod_base = OTHER; note = 2'O-methyl cytidine
  modified_base 21: mod_base = OTHER; note = 2'O-methyl uridine 6-(5-(((2R,3R,4R,5R,6R)-3-acetamido-4,5-dihydroxy-6-(hydrox ymethyl)tetrahydro-2H-pyran-2-yl)oxy)pentanamido)-N-(6-(4-( hydroxymethyl)-4-(methoxymethyl)piperidin-1-yl)-6-oxohexyl) hexanamide-phosphorothioate-6-(5-(((2R,3R,4R,5R,6R)-3-aceta mido-4,5-dihydroxy-6-(hydroxymethyl)tetrahydro-2H-pyran-2-y l)oxy)pentanamido)-N-(6-(4-(hydroxymethyl)-4-(methoxymethyl )piperidin-1-yl)-6-oxohexyl)hexanamide-phosphorothioate-6-( 5-(((2R,3R,4R,5R,6R)-3-acetamido-4,5-dihydroxy-6-(hydroxyme thyl)tetrahydro-2H-pyran-2-yl)oxy)pentanamido)-N-(6-(4-(hyd roxymethyl)-4-(methoxymethyl)piperidin-1-yl)-6-oxohexyl)hex anamide
tggtatcaaaacctcatgtct

SEQ ID NO: 597 - RNA, 21 nt, synthetic construct
  source 1..21: mol_type = other RNA
  modified_base 1: mod_base = OTHER; note = 2'O-methyl guanosine phosphorothioate
  modified_base 2: mod_base = OTHER; note = 2'O-methyl uridine phosphorothioate
  modified_base 3: mod_base = OTHER; note = 2'O-methyl adenosine
  modified_base 4: mod_base = OTHER; note = 2'O-methyl uridine
  modified_base 5: mod_base = OTHER; note = 2'O-methyl cytidine
  modified_base 6: mod_base = OTHER; note = 2'O-methyl adenosine
  modified_base 7: mod_base = OTHER; note = 2'-fluoro adenosine
  modified_base 8: mod_base = OTHER; note = 2'O-methyl adenosine
  modified_base 9: mod_base = OTHER; note = 2'-fluoro adenosine
  modified_base 10: mod_base = OTHER; note = 2'-fluoro cytidine
  modified_base 11: mod_base = OTHER; note = 2'-fluoro cytidine
  modified_base 12: mod_base = OTHER; note = 2'O-methyl uridine
  modified_base 13: mod_base = OTHER; note = 2'O-methyl cytidine
  modified_base 14: mod_base = OTHER; note = 2'O-methyl adenosine
  modified_base 15: mod_base = OTHER; note = 2'O-methyl uridine
  modified_base 16: mod_base = OTHER; note = 2'O-methyl guanosine
  modified_base 17: mod_base = OTHER; note = 2'O-methyl uridine
  modified_base 18: mod_base = OTHER; note = 2'O-methyl cytidine
  modified_base 19: mod_base = OTHER; note = 2'O-methyl uridine
  modified_base 20: mod_base = OTHER; note = 2'O-methyl cytidine
  modified_base 21: mod_base = OTHER; note = 2'O-methyl uridine 6-(5-(((2R,3R,4R,5R,6R)-3-acetamido-4,5-dihydroxy-6-(hydrox ymethyl)tetrahydro-2H-pyran-2-yl)oxy)pentanamido)-N-(6-(4-( hydroxymethyl)-4-(methoxymethyl)piperidin-1-yl)-6-oxohexyl) hexanamide-phosphorothioate-6-(5-(((2R,3R,4R,5R,6R)-3-aceta mido-4,5-dihydroxy-6-(hydroxymethyl)tetrahydro-2H-pyran-2-y l)oxy)pentanamido)-N-(6-(4-(hydroxymethyl)-4-(methoxymethyl )piperidin-1-yl)-6-oxohexyl)hexanamide-phosphorothioate-6-( 5-(((2R,3R,4R,5R,6R)-3-acetamido-4,5-dihydroxy-6-(hydroxyme thyl)tetrahydro-2H-pyran-2-yl)oxy)pentanamido)-N-(6-(4-(hyd roxymethyl)-4-(methoxymethyl)piperidin-1-yl)-6-oxohexyl)hex anamide
gtatcaaaacctcatgtctct

SEQ ID NO: 598 - RNA, 21 nt, synthetic construct
  source 1..21: mol_type = other RNA
  modified_base 1: mod_base = OTHER; note = 2'O-methyl guanosine phosphorothioate
  modified_base 2: mod_base = OTHER; note = 2'O-methyl uridine phosphorothioate
  modified_base 3: mod_base = OTHER; note = 2'O-methyl adenosine
  modified_base 4: mod_base = OTHER; note = 2'O-methyl uridine
  modified_base 5: mod_base = OTHER; note = 2'O-methyl cytidine
  modified_base 6: mod_base = OTHER; note = 2'O-methyl adenosine
  modified_base 7: mod_base = OTHER; note = 2'-fluoro adenosine
  modified_base 8: mod_base = OTHER; note = 2'O-methyl adenosine
  modified_base 9: mod_base = OTHER; note = 2'-fluoro adenosine
  modified_base 10: mod_base = OTHER; note = 2'-fluoro cytidine
  modified_base 11: mod_base = OTHER; note = 2'-fluoro cytidine
  modified_base 12: mod_base = OTHER; note = 2'O-methyl uridine
  modified_base 13: mod_base = OTHER; note = 2'O-methyl cytidine
  modified_base 14: mod_base = OTHER; note = 2'O-methyl adenosine
  modified_base 15: mod_base = OTHER; note = 2'O-methyl uridine
  modified_base 16: mod_base = OTHER; note = 2'O-methyl guanosine
  modified_base 17: mod_base = OTHER; note = 2'O-methyl uridine
  modified_base 18: mod_base = OTHER; note = 2'O-methyl cytidine
  modified_base 19: mod_base = OTHER; note = 2'O-methyl uridine
  modified_base 20: mod_base = OTHER; note = 2'O-methyl cytidine
  modified_base 21: mod_base = OTHER; note = 2'O-methyl uridine 6-(5-(((2R,3R,4R,5R,6R)-3-acetamido-4,5-dihydroxy-6-(hydrox ymethyl)tetrahydro-2H-pyran-2-yl)oxy)pentanamido)-N-(6-(4-( hydroxymethyl)-4-(methoxymethyl)piperidin-1-yl)-6-oxohexyl) hexanamide-phosphorothioate-6-(5-(((2R,3R,4R,5R,6R)-3-aceta mido-4,5-dihydroxy-6-(hydroxymethyl)tetrahydro-2H-pyran-2-y l)oxy)pentanamido)-N-(6-(4-(hydroxymethyl)-4-(methoxymethyl )piperidin-1-yl)-6-oxohexyl)hexanamide-phosphorothioate-6-( 5-(((2R,3R,4R,5R,6R)-3-acetamido-4,5-dihydroxy-6-(hydroxyme thyl)tetrahydro-2H-pyran-2-yl)oxy)pentanamido)-N-(6-(4-(hyd roxymethyl)-4-(methoxymethyl)piperidin-1-yl)-6-oxohexyl)hex anamide
gtatcaaaacctcatgtctct

SEQ ID NO: 599 - RNA, 21 nt, synthetic construct
  source 1..21: mol_type = other RNA
  modified_base 1: mod_base = OTHER; note = 2'O-methyl guanosine phosphorothioate
  modified_base 2: mod_base = OTHER; note = 2'O-methyl uridine phosphorothioate
  modified_base 3: mod_base = OTHER; note = 2'O-methyl adenosine
  modified_base 4: mod_base = OTHER; note = 2'O-methyl uridine
  modified_base 5: mod_base = OTHER; note = 2'O-methyl cytidine
  modified_base 6: mod_base = OTHER; note = 2'O-methyl adenosine
  modified_base 7: mod_base = OTHER; note = 2'-fluoro adenosine
  modified_base 8: mod_base = OTHER; note = 2'O-methyl adenosine
  modified_base 9: mod_base = OTHER; note = 2'-fluoro adenosine
  modified_base 10: mod_base = OTHER; note = 2'-fluoro cytidine
  modified_base 11: mod_base = OTHER; note = 2'-fluoro cytidine
  modified_base 12: mod_base = OTHER; note = 2'O-methyl uridine
  modified_base 13: mod_base = OTHER; note = 2'O-methyl cytidine
  modified_base 14: mod_base = OTHER; note = 2'O-methyl adenosine
  modified_base 15: mod_base = OTHER; note = 2'O-methyl uridine
  modified_base 16: mod_base = OTHER; note = 2'O-methyl guanosine
  modified_base 17: mod_base = OTHER; note = 2'O-methyl uridine
  modified_base 18: mod_base = OTHER; note = 2'O-methyl cytidine
  modified_base 19: mod_base = OTHER; note = 2'O-methyl uridine
  modified_base 20: mod_base = OTHER; note = 2'O-methyl cytidine
  modified_base 21: mod_base = OTHER; note = 2'O-methyl uridine 6-(5-(((2R,3R,4R,5R,6R)-3-acetamido-4,5-dihydroxy-6-(hydrox ymethyl)tetrahydro-2H-pyran-2-yl)oxy)pentanamido)-N-(6-(4-( hydroxymethyl)-4-(methoxymethyl)piperidin-1-yl)-6-oxohexyl) hexanamide-phosphorothioate-6-(5-(((2R,3R,4R,5R,6R)-3-aceta mido-4,5-dihydroxy-6-(hydroxymethyl)tetrahydro-2H-pyran-2-y l)oxy)pentanamido)-N-(6-(4-(hydroxymethyl)-4-(methoxymethyl )piperidin-1-yl)-6-oxohexyl)hexanamide-phosphorothioate-6-( 5-(((2R,3R,4R,5R,6R)-3-acetamido-4,5-dihydroxy-6-(hydroxyme thyl)tetrahydro-2H-pyran-2-yl)oxy)pentanamido)-N-(6-(4-(hyd roxymethyl)-4-(methoxymethyl)piperidin-1-yl)-6-oxohexyl)hex anamide
gtatcaaaacctcatgtctct

SEQ ID NO: 600 - RNA, 21 nt, synthetic construct
  source 1..21: mol_type = other RNA
  modified_base 1: mod_base = OTHER; note = 2'O-methyl guanosine phosphorothioate
  modified_base 2: mod_base = OTHER; note = 2'O-methyl uridine phosphorothioate
  modified_base 3: mod_base = OTHER; note = 2'O-methyl adenosine
  modified_base 4: mod_base = OTHER; note = 2'O-methyl uridine
  modified_base 5: mod_base = OTHER; note = 2'O-methyl cytidine
  modified_base 6: mod_base = OTHER; note = 2'O-methyl adenosine
  modified_base 7: mod_base = OTHER; note = 2'-fluoro adenosine
  modified_base 8: mod_base = OTHER; note = 2'O-methyl adenosine
  modified_base 9: mod_base = OTHER; note = 2'-fluoro adenosine
  modified_base 10: mod_base = OTHER; note = 2'-fluoro cytidine
  modified_base 11: mod_base = OTHER; note = 2'-fluoro cytidine
  modified_base 12: mod_base = OTHER; note = 2'O-methyl uridine
  modified_base 13: mod_base = OTHER; note = 2'O-methyl cytidine
  modified_base 14: mod_base = OTHER; note = 2'O-methyl adenosine
  modified_base 15: mod_base = OTHER; note = 2'O-methyl uridine
  modified_base 16: mod_base = OTHER; note = 2'O-methyl guanosine
  modified_base 17: mod_base = OTHER; note = 2'O-methyl uridine
  modified_base 18: mod_base = OTHER; note = 2'O-methyl cytidine
  modified_base 19: mod_base = OTHER; note = 2'O-methyl uridine
  modified_base 20: mod_base = OTHER; note = 2'O-methyl cytidine
  modified_base 21: mod_base = OTHER; note = 2'O-methyl uridine 6-(5-(((2R,3R,4R,5R,6R)-3-acetamido-4,5-dihydroxy-6-(hydrox ymethyl)tetrahydro-2H-pyran-2-yl)oxy)pentanamido)-N-(6-(4-( hydroxymethyl)-4-(methoxymethyl)piperidin-1-yl)-6-oxohexyl) hexanamide-phosphorothioate-6-(5-(((2R,3R,4R,5R,6R)-3-aceta mido-4,5-dihydroxy-6-(hydroxymethyl)tetrahydro-2H-pyran-2-y l)oxy)pentanamido)-N-(6-(4-(hydroxymethyl)-4-(methoxymethyl )piperidin-1-yl)-6-oxohexyl)hexanamide-phosphorothioate-6-( 5-(((2R,3R,4R,5R,6R)-3-acetamido-4,5-dihydroxy-6-(hydroxyme thyl)tetrahydro-2H-pyran-2-yl)oxy)pentanamido)-N-(6-(4-(hyd roxymethyl)-4-(methoxymethyl)piperidin-1-yl)-6-oxohexyl)hex anamide
gtatcaaaacctcatgtctct

SEQ ID NO: 601 - RNA, 21 nt, synthetic construct
  source 1..21: mol_type = other RNA
  modified_base 1: mod_base = OTHER; note = 2'O-methyl uridine phosphorothioate
  modified_base 2: mod_base = OTHER; note = 2'O-methyl guanosine phosphorothioate
  modified_base 3: mod_base = OTHER; note = 2'O-methyl adenosine
  modified_base 4: mod_base = OTHER; note = 2'O-methyl adenosine
  modified_base 5: mod_base = OTHER; note = 2'O-methyl guanosine
  modified_base 6: mod_base = OTHER; note = 2'O-methyl uridine
  modified_base 7: mod_base = OTHER; note = 2'-fluoro cytidine
  modified_base 8: mod_base = OTHER; note = 2'O-methyl guanosine
  modified_base 9: mod_base = OTHER; note = 2'-fluoro uridine
  modified_base 10: mod_base = OTHER; note = 2'-fluoro adenosine
  modified_base 11: mod_base = OTHER; note = 2'-fluoro adenosine
  modified_base 12: mod_base = OTHER; note = 2'O-methyl guanosine
  modified_base 13: mod_base = OTHER; note = 2'O-methyl adenosine
  modified_base 14: mod_base = OTHER; note = 2'O-methyl adenosine
  modified_base 15: mod_base = OTHER; note = 2'O-methyl guanosine
  modified_base 16: mod_base = OTHER; note = 2'O-methyl uridine
  modified_base 17: mod_base = OTHER; note = 2'O-methyl cytidine
  modified_base 18: mod_base = OTHER; note = 2'O-methyl uridine
  modified_base 19: mod_base = OTHER; note = 2'O-methyl guanosine
  modified_base 20: mod_base = OTHER; note = 2'O-methyl adenosine phosphorothioate
  modified_base 21: mod_base = OTHER; note = 2'O-methyl uridine 6-(5-(((2R,3R,4R,5R,6R)-3-acetamido-4,5-dihydroxy-6-(hydrox ymethyl)tetrahydro-2H-pyran-2-yl)oxy)pentanamido)-N-(6-(4-( hydroxymethyl)-4-(methoxymethyl)piperidin-1-yl)-6-oxohexyl) hexanamide-phosphorothioate-6-(5-(((2R,3R,4R,5R,6R)-3-aceta mido-4,5-dihydroxy-6-(hydroxymethyl)tetrahydro-2H-pyran-2-y l)oxy)pentanamido)-N-(6-(4-(hydroxymethyl)-4-(methoxymethyl )piperidin-1-yl)-6-oxohexyl)hexanamide-phosphorothioate-6-( 5-(((2R,3R,4R,5R,6R)-3-acetamido-4,5-dihydroxy-6-(hydroxyme thyl)tetrahydro-2H-pyran-2-yl)oxy)pentanamido)-N-(6-(4-(hyd roxymethyl)-4-(methoxymethyl)piperidin-1-yl)-6-oxohexyl)hex anamide
tgaagtcgtaagaagtctgat

SEQ ID NO: 602 - RNA, 21 nt, synthetic construct
  source 1..21: mol_type = other RNA
  modified_base 1: mod_base = OTHER; note = 2'O-methyl uridine phosphorothioate
  modified_base 2: mod_base = OTHER; note = 2'O-methyl uridine phosphorothioate
  modified_base 3: mod_base = OTHER; note = 2'O-methyl guanosine
  modified_base 4: mod_base = OTHER; note = 2'O-methyl guanosine
  modified_base 5: mod_base = OTHER; note = 2'O-methyl uridine
  modified_base 6: mod_base = OTHER; note = 2'O-methyl guanosine
  modified_base 7: mod_base = OTHER; note = 2'-fluoro adenosine
  modified_base 8: mod_base = OTHER; note = 2'O-methyl adenosine
  modified_base 9: mod_base = OTHER; note = 2'-fluoro guanosine
  modified_base 10: mod_base = OTHER; note = 2'-fluoro uridine
  modified_base 11: mod_base = OTHER; note = 2'-fluoro uridine
  modified_base 12: mod_base = OTHER; note = 2'O-methyl uridine
  modified_base 13: mod_base = OTHER; note = 2'O-methyl uridine
  modified_base 14: mod_base = OTHER; note = 2'O-methyl uridine
  modified_base 15: mod_base = OTHER; note = 2'O-methyl cytidine
  modified_base 16: mod_base = OTHER; note = 2'O-methyl adenosine
  modified_base 17: mod_base = OTHER; note = 2'O-methyl uridine
  modified_base 18: mod_base = OTHER; note = 2'O-methyl uridine
  modified_base 19: mod_base = OTHER; note = 2'O-methyl cytidine
  modified_base 20: mod_base = OTHER; note = 2'O-methyl cytidine phosphorothioate
  modified_base 21: mod_base = OTHER; note = 2'O-methyl uridine 6-(5-(((2R,3R,4R,5R,6R)-3-acetamido-4,5-dihydroxy-6-(hydrox ymethyl)tetrahydro-2H-pyran-2-yl)oxy)pentanamido)-N-(6-(4-( hydroxymethyl)-4-(methoxymethyl)piperidin-1-yl)-6-oxohexyl) hexanamide-phosphorothioate-6-(5-(((2R,3R,4R,5R,6R)-3-aceta mido-4,5-dihydroxy-6-(hydroxymethyl)tetrahydro-2H-pyran-2-y l)oxy)pentanamido)-N-(6-(4-(hydroxymethyl)-4-(methoxymethyl )piperidin-1-yl)-6-oxohexyl)hexanamide-phosphorothioate-6-( 5-(((2R,3R,4R,5R,6R)-3-acetamido-4,5-dihydroxy-6-(hydroxyme thyl)tetrahydro-2H-pyran-2-yl)oxy)pentanamido)-N-(6-(4-(hyd roxymethyl)-4-(methoxymethyl)piperidin-1-yl)-6-oxohexyl)hex anamide
ttggtgaagtttttcattcct

SEQ ID NO: 603 - RNA, 21 nt, synthetic construct
  source 1..21: mol_type = other RNA
  modified_base 1: mod_base = OTHER; note = 2'O-methyl adenosine phosphorothioate
  modified_base 2: mod_base = OTHER; note = 2'O-methyl cytidine phosphorothioate
  modified_base 3: mod_base = OTHER; note = 2'O-methyl cytidine
  modified_base 4: mod_base = OTHER; note = 2'O-methyl adenosine
  modified_base 5: mod_base = OTHER; note = 2'O-methyl adenosine
  modified_base 6: mod_base = OTHER; note = 2'O-methyl uridine
  modified_base 7: mod_base = OTHER; note = 2'-fluoro adenosine
  modified_base 8: mod_base = OTHER; note = 2'O-methyl adenosine
  modified_base 9: mod_base = OTHER; note = 2'-fluoro guanosine
  modified_base 10: mod_base = OTHER; note = 2'-fluoro adenosine
  modified_base 11: mod_base = OTHER; note = 2'-fluoro adenosine
  modified_base 12: mod_base = OTHER; note = 2'O-methyl adenosine
  modified_base 13: mod_base = OTHER; note = 2'O-methyl adenosine
  modified_base 14: mod_base = OTHER; note = 2'O-methyl uridine
  modified_base 15: mod_base = OTHER; note = 2'O-methyl guanosine
  modified_base 16: mod_base = OTHER; note = 2'O-methyl adenosine
  modified_base 17: mod_base = OTHER; note = 2'O-methyl uridine
  modified_base 18: mod_base = OTHER; note = 2'O-methyl uridine
  modified_base 19: mod_base = OTHER; note = 2'O-methyl uridine
  modified_base 20: mod_base = OTHER; note = 2'O-methyl uridine phosphorothioate
  modified_base 21: mod_base = OTHER; note = 2'O-methyl uridine 6-(5-(((2R,3R,4R,5R,6R)-3-acetamido-4,5-dihydroxy-6-(hydrox ymethyl)tetrahydro-2H-pyran-2-yl)oxy)pentanamido)-N-(6-(4-( hydroxymethyl)-4-(methoxymethyl)piperidin-1-yl)-6-oxohexyl) hexanamide-phosphorothioate-6-(5-(((2R,3R,4R,5R,6R)-3-aceta mido-4,5-dihydroxy-6-(hydroxymethyl)tetrahydro-2H-pyran-2-y l)oxy)pentanamido)-N-(6-(4-(hydroxymethyl)-4-(methoxymethyl )piperidin-1-yl)-6-oxohexyl)hexanamide-phosphorothioate-6-( 5-(((2R,3R,4R,5R,6R)-3-acetamido-4,5-dihydroxy-6-(hydroxyme thyl)tetrahydro-2H-pyran-2-yl)oxy)pentanamido)-N-(6-(4-(hyd roxymethyl)-4-(methoxymethyl)piperidin-1-yl)-6-oxohexyl)hex anamide
accaataagaaaatgattttt

SEQ ID NO: 604 - RNA, 23 nt, synthetic construct
  source 1..23: mol_type = other RNA
  modified_base 1: mod_base = OTHER; note = 2'O-methyl adenosine phosphorothioate
  modified_base 2: mod_base = OTHER; note = 2'-fluoro adenosine phosphorothioate
  modified_base 3: mod_base = OTHER; note = 2'O-methyl cytidine
  modified_base 4: mod_base = OTHER; note = 2'O-methyl uridine
  modified_base 5: mod_base = OTHER; note = 2'O-methyl uridine
  modified_base 6: mod_base = OTHER; note = 2'-fluoro cytidine
  modified_base 7: mod_base = OTHER; note = 2'O-methyl adenosine
  modified_base 8: mod_base = OTHER; note = 2'O-methyl cytidine
  modified_base 9: mod_base = OTHER; note = 2'O-methyl cytidine
  modified_base 10: mod_base = OTHER; note = 2'O-methyl adenosine
  modified_base 11: mod_base = OTHER; note = 2'O-methyl adenosine
  modified_base 12: mod_base = OTHER; note = 2'O-methyl cytidine
  modified_base 13: mod_base = OTHER; note = 2'O-methyl guanosine
  modified_base 14: mod_base = OTHER; note = 2'-fluoro adenosine
  modified_base 15: mod_base = OTHER; note = 2'O-methyl cytidine
  modified_base 16: mod_base = OTHER; note = 2'-fluoro uridine
  modified_base 17: mod_base = OTHER; note = 2'O-methyl cytidine
  modified_base 18: mod_base = OTHER; note = 2'O-methyl cytidine
  modified_base 19: mod_base = OTHER; note = 2'O-methyl adenosine
  modified_base 20: mod_base = OTHER; note = 2'O-methyl adenosine
  modified_base 21: mod_base = OTHER; note = 2'O-methyl guanosine phosphorothioate
  modified_base 22: mod_base = OTHER; note = 2'O-methyl uridine phosphorothioate
  modified_base 23: mod_base = OTHER; note = 2'O-methyl uridine
aacttcaccaacgactccaagtt

SEQ ID NO: 605 - RNA, 21 nt, synthetic construct
  source 1..21: mol_type = other RNA
  modified_base 1: mod_base = OTHER; note = 5' vinyl phosphonate 2'O-methyl adenosine phosphorothioate
  modified_base 2: mod_base = OTHER; note = 2'-fluoro adenosine phosphorothioate
  modified_base 3: mod_base = OTHER; note = 2'O-methyl cytidine
  modified_base 4: mod_base = OTHER; note = 2'O-methyl uridine
  modified_base 5: mod_base = OTHER; note = 2'O-methyl uridine
  modified_base 6: mod_base = OTHER; note = 2'-fluoro cytidine
  modified_base 7: mod_base = OTHER; note = 2'O-methyl adenosine
  modified_base 8: mod_base = OTHER; note = 2'O-methyl cytidine
  modified_base 9: mod_base = OTHER; note = 2'O-methyl cytidine
  modified_base 10: mod_base = OTHER; note = 2'O-methyl adenosine
  modified_base 11: mod_base = OTHER; note = 2'O-methyl adenosine
  modified_base 12: mod_base = OTHER; note = 2'O-methyl cytidine
  modified_base 13: mod_base = OTHER; note = 2'O-methyl guanosine
  modified_base 14: mod_base = OTHER; note = 2'-fluoro adenosine
  modified_base 15: mod_base = OTHER; note = 2'O-methyl cytidine
  modified_base 16: mod_base = OTHER; note = 2'-fluoro uridine
  modified_base 17: mod_base = OTHER; note = 2'O-methyl cytidine
  modified_base 18: mod_base = OTHER; note = 2'O-methyl cytidine
  modified_base 19: mod_base = OTHER; note = 2'O-methyl adenosine phosphorothioate
  modified_base 20: mod_base = OTHER; note = 2'O-methyl adenosine phosphorothioate
  modified_base 21: mod_base = OTHER; note = 2'O-methyl guanosine
aacttcaccaacgactccaag

SEQ ID NO: 606 - RNA, 21 nt, synthetic construct
  source 1..21: mol_type = other RNA
  modified_base 1: mod_base = OTHER; note = 2'O-methyl adenosine phosphorothioate
  modified_base 2: mod_base = OTHER; note = 2'-fluoro adenosine phosphorothioate
  modified_base 3: mod_base = OTHER; note = 2'O-methyl cytidine
  modified_base 4: mod_base = OTHER; note = 2'O-methyl uridine
  modified_base 5: mod_base = OTHER; note = 2'O-methyl uridine
  modified_base 6: mod_base = OTHER; note = 2'-fluoro cytidine
  modified_base 7: mod_base = OTHER; note = 2'O-methyl adenosine
  modified_base 8: mod_base = OTHER; note = 2'O-methyl cytidine
  modified_base 9: mod_base = OTHER; note = 2'O-methyl cytidine
  modified_base 10: mod_base = OTHER; note = 2'O-methyl adenosine
  modified_base 11: mod_base = OTHER; note = 2'O-methyl adenosine
  modified_base 12: mod_base = OTHER; note = 2'O-methyl cytidine
  modified_base 13: mod_base = OTHER; note = 2'O-methyl guanosine
  modified_base 14: mod_base = OTHER; note = 2'-fluoro adenosine
  modified_base 15: mod_base = OTHER; note = 2'O-methyl cytidine
  modified_base 16: mod_base = OTHER; note = 2'-fluoro uridine
  modified_base 17: mod_base = OTHER; note = 2'O-methyl cytidine
  modified_base 18: mod_base = OTHER; note = 2'O-methyl cytidine
  modified_base 19: mod_base = OTHER; note = 2'O-methyl adenosine phosphorothioate
  modified_base 20: mod_base = OTHER; note = 2'O-methyl adenosine phosphorothioate
  modified_base 21: mod_base = OTHER; note = 2'O-methyl guanosine
aacttcaccaacgactccaag

SEQ ID NO: 607 - RNA, 23 nt, synthetic construct
  source 1..23: mol_type = other RNA
  modified_base 1: mod_base = OTHER; note = 5' vinyl phosphonate 2'O-methyl adenosine phosphorothioate
  modified_base 2: mod_base = OTHER; note = 2'-fluoro adenosine phosphorothioate
  modified_base 3: mod_base = OTHER; note = 2'O-methyl cytidine
  modified_base 4: mod_base = OTHER; note = 2'O-methyl uridine
  modified_base 5: mod_base = OTHER; note = 2'O-methyl uridine
  modified_base 6: mod_base = OTHER; note = 2'-fluoro cytidine
  modified_base 7: mod_base = OTHER; note = 2'O-methyl adenosine
  modified_base 8: mod_base = OTHER; note = 2'O-methyl cytidine
  modified_base 9: mod_base = OTHER; note = 2'O-methyl cytidine
  modified_base 10: mod_base = OTHER; note = 2'O-methyl adenosine
  modified_base 11: mod_base = OTHER; note = 2'O-methyl adenosine
  modified_base 12: mod_base = OTHER; note = 2'O-methyl cytidine
  modified_base 13: mod_base = OTHER; note = 2'O-methyl guanosine
  modified_base 14: mod_base = OTHER; note = 2'-fluoro adenosine
  modified_base 15: mod_base = OTHER; note = 2'O-methyl cytidine
  modified_base 16: mod_base = OTHER; note = 2'-fluoro uridine
  modified_base 17: mod_base = OTHER; note = 2'O-methyl cytidine
  modified_base 18: mod_base = OTHER; note = 2'O-methyl cytidine
  modified_base 19: mod_base = OTHER; note = 2'O-methyl adenosine
  modified_base 20: mod_base = OTHER; note = 2'O-methyl adenosine
  modified_base 21: mod_base = OTHER; note = 2'O-methyl guanosine phosphorothioate
  modified_base 22: mod_base = OTHER; note = 2'O-methyl uridine phosphorothioate
  modified_base 23: mod_base = OTHER; note = 2'O-methyl adenosine
aacttcaccaacgactccaagta

SEQ ID NO: 608 - RNA, 23 nt, synthetic construct
  source 1..23: mol_type = other RNA
  modified_base 1: mod_base = OTHER; note = 2'O-methyl adenosine phosphorothioate
  modified_base 2: mod_base = OTHER; note = 2'-fluoro adenosine phosphorothioate
  modified_base 3: mod_base = OTHER; note = 2'O-methyl cytidine
  modified_base 4: mod_base = OTHER; note = 2'O-methyl uridine
  modified_base 5: mod_base = OTHER; note = 2'O-methyl uridine
  modified_base 6: mod_base = OTHER; note = 2'-fluoro cytidine
  modified_base 7: mod_base = OTHER; note = 2'O-methyl adenosine
  modified_base 8: mod_base = OTHER; note = 2'O-methyl cytidine
  modified_base 9: mod_base = OTHER; note = 2'O-methyl cytidine
  modified_base 10: mod_base = OTHER; note = 2'O-methyl adenosine
  modified_base 11: mod_base = OTHER; note = 2'O-methyl adenosine
  modified_base 12: mod_base = OTHER; note = 2'O-methyl cytidine
  modified_base 13: mod_base = OTHER; note = 2'O-methyl guanosine
  modified_base 14: mod_base = OTHER; note = 2'-fluoro adenosine
  modified_base 15: mod_base = OTHER; note = 2'O-methyl cytidine
  modified_base 16: mod_base = OTHER; note = 2'-fluoro uridine
  modified_base 17: mod_base = OTHER; note = 2'O-methyl cytidine
  modified_base 18: mod_base = OTHER; note = 2'O-methyl cytidine
  modified_base 19: mod_base = OTHER; note = 2'O-methyl adenosine
  modified_base 20: mod_base = OTHER; note = 2'O-methyl adenosine
  modified_base 21: mod_base = OTHER; note = 2'O-methyl guanosine phosphorothioate
  modified_base 22: mod_base = OTHER; note = 2'O-methyl uridine phosphorothioate
  modified_base 23: mod_base = OTHER; note = 2'O-methyl adenosine
aacttcaccaacgactccaagta

SEQ ID NO: 609 - RNA, 23 nt, synthetic construct
  source 1..23: mol_type = other RNA
  modified_base 1: mod_base = OTHER; note = 2'O-methyl adenosine phosphorothioate
  modified_base 2: mod_base = OTHER; note = 2'-fluoro adenosine phosphorothioate
  modified_base 3: mod_base = OTHER; note = 2'O-methyl adenosine
  modified_base 4: mod_base = OTHER; note = 2'O-methyl adenosine
  modified_base 5: mod_base = OTHER; note = 2'O-methyl cytidine
  modified_base 6: mod_base = OTHER; note = 2'-fluoro uridine
  modified_base 7: mod_base = OTHER; note = 2'O-methyl uridine
  modified_base 8: mod_base = OTHER; note = 2'O-methyl cytidine
  modified_base 9: mod_base = OTHER; note = 2'O-methyl adenosine
  modified_base 10: mod_base = OTHER; note = 2'O-methyl cytidine
  modified_base 11: mod_base = OTHER; note = 2'O-methyl cytidine
  modified_base 12: mod_base = OTHER; note = 2'O-methyl adenosine
  modified_base 13: mod_base = OTHER; note = 2'O-methyl adenosine
  modified_base 14: mod_base = OTHER; note = 2'-fluoro cytidine
  modified_base 15: mod_base = OTHER; note = 2'O-methyl guanosine
  modified_base 16: mod_base = OTHER; note = 2'-fluoro adenosine
  modified_base 17: mod_base = OTHER; note = 2'O-methyl cytidine
  modified_base 18: mod_base = OTHER; note = 2'O-methyl uridine
  modified_base 19: mod_base = OTHER; note = 2'O-methyl cytidine
  modified_base 20: mod_base = OTHER; note = 2'O-methyl cytidine
  modified_base 21: mod_base = OTHER; note = 2'O-methyl adenosine phosphorothioate
  modified_base 22: mod_base = OTHER; note = 2'O-methyl uridine phosphorothioate
  modified_base 23: mod_base = OTHER; note = 2'O-methyl uridine
aaaacttcaccaacgactccatt

SEQ ID NO: 610 - RNA, 21 nt, synthetic construct
  source 1..21: mol_type = other RNA
  modified_base 1: mod_base = OTHER; note = 5' vinyl phosphonate 2'O-methyl adenosine phosphorothioate
  modified_base 2: mod_base = OTHER; note = 2'-fluoro guanosine phosphorothioate
  modified_base 3: mod_base = OTHER; note = 2'O-methyl guanosine
  modified_base 4: mod_base = OTHER; note = 2'O-methyl adenosine
  modified_base 5: mod_base = OTHER; note = 2'O-methyl adenosine
  modified_base 6: mod_base = OTHER; note = 2'-fluoro uridine
  modified_base 7: mod_base = OTHER; note = 2'O-methyl guanosine
  modified_base 8: mod_base = OTHER; note = 2'O-methyl adenosine
  modified_base 9: mod_base = OTHER; note = 2'O-methyl adenosine
  modified_base 10: mod_base = OTHER; note = 2'O-methyl adenosine
  modified_base 11: mod_base = OTHER; note = 2'O-methyl adenosine
  modified_base 12: mod_base = OTHER; note = 2'O-methyl adenosine
  modified_base 13: mod_base = OTHER; note = 2'O-methyl cytidine
  modified_base 14: mod_base = OTHER; note = 2'-fluoro uridine
  modified_base 15: mod_base = OTHER; note = 2'O-methyl uridine
  modified_base 16: mod_base = OTHER; note = 2'-fluoro cytidine
  modified_base 17: mod_base = OTHER; note = 2'O-methyl adenosine
  modified_base 18: mod_base = OTHER; note = 2'O-methyl cytidine
  modified_base 19: mod_base = OTHER; note = 2'O-methyl cytidine phosphorothioate
  modified_base 20: mod_base = OTHER; note = 2'O-methyl adenosine phosphorothioate
  modified_base 21: mod_base = OTHER; note = 2'O-methyl adenosine
aggaatgaaaaacttcaccaa

SEQ ID NO: 611 - RNA, 21 nt, synthetic construct
  source 1..21: mol_type = other RNA
  modified_base 1: mod_base = OTHER; note = 2'O-methyl adenosine phosphorothioate
  modified_base 2: mod_base = OTHER; note = 2'-fluoro guanosine phosphorothioate
  modified_base 3: mod_base = OTHER; note = 2'O-methyl guanosine
  modified_base 4: mod_base = OTHER; note = 2'O-methyl adenosine
  modified_base 5: mod_base = OTHER; note = 2'O-methyl adenosine
  modified_base 6: mod_base = OTHER; note = 2'-fluoro uridine
  modified_base 7: mod_base = OTHER; note = 2'O-methyl guanosine
  modified_base 8: mod_base = OTHER; note = 2'O-methyl adenosine
  modified_base 9: mod_base = OTHER; note = 2'O-methyl adenosine
  modified_base 10: mod_base = OTHER; note = 2'O-methyl adenosine
  modified_base 11: mod_base = OTHER; note = 2'O-methyl adenosine
  modified_base 12: mod_base = OTHER; note = 2'O-methyl adenosine
  modified_base 13: mod_base = OTHER; note = 2'O-methyl cytidine
  modified_base 14: mod_base = OTHER; note = 2'-fluoro uridine
  modified_base 15: mod_base = OTHER; note = 2'O-methyl uridine
  modified_base 16: mod_base = OTHER; note = 2'-fluoro cytidine
  modified_base 17: mod_base = OTHER; note = 2'O-methyl adenosine
  modified_base 18: mod_base = OTHER; note = 2'O-methyl cytidine
  modified_base 19: mod_base = OTHER; note = 2'O-methyl cytidine phosphorothioate
  modified_base 20: mod_base = OTHER; note = 2'O-methyl adenosine phosphorothioate
  modified_base 21: mod_base = OTHER; note = 2'O-methyl adenosine
aggaatgaaaaacttcaccaa

SEQ ID NO: 612 - RNA, 23 nt, synthetic construct
  source 1..23: mol_type = other RNA
  modified_base 1: mod_base = OTHER; note = 5' vinyl phosphonate 2'O-methyl adenosine phosphorothioate
  modified_base 2: mod_base = OTHER; note = 2'-fluoro guanosine phosphorothioate
  modified_base 3: mod_base = OTHER; note = 2'O-methyl guanosine
  modified_base 4: mod_base = OTHER; note = 2'O-methyl adenosine
  modified_base 5: mod_base = OTHER; note = 2'O-methyl adenosine
  modified_base 6: mod_base = OTHER; note = 2'-fluoro uridine
  modified_base 7: mod_base = OTHER; note = 2'O-methyl guanosine
  modified_base 8: mod_base = OTHER; note = 2'O-methyl adenosine
  modified_base 9: mod_base = OTHER; note = 2'O-methyl adenosine
  modified_base 10: mod_base = OTHER; note = 2'O-methyl adenosine
  modified_base 11: mod_base = OTHER; note = 2'O-methyl adenosine
  modified_base 12: mod_base = OTHER; note = 2'O-methyl adenosine
  modified_base 13: mod_base = OTHER; note = 2'O-methyl cytidine
  modified_base 14: mod_base = OTHER; note = 2'-fluoro uridine
  modified_base 15: mod_base = OTHER; note = 2'O-methyl uridine
  modified_base 16: mod_base = OTHER; note = 2'-fluoro cytidine
  modified_base 17: mod_base = OTHER; note = 2'O-methyl adenosine
  modified_base 18: mod_base = OTHER; note = 2'O-methyl cytidine
  modified_base 19: mod_base = OTHER; note = 2'O-methyl cytidine
  modified_base 20: mod_base = OTHER; note = 2'O-methyl adenosine
  modified_base 21: mod_base = OTHER; note = 2'O-methyl adenosine phosphorothioate
  modified_base 22: mod_base = OTHER; note = 2'O-methyl cytidine phosphorothioate
  modified_base 23: mod_base = OTHER; note = 2'O-methyl guanosine
aggaatgaaaaacttcaccaacg

SEQ ID NO: 613 - RNA, 23 nt, synthetic construct
  source 1..23: mol_type = other RNA
  modified_base 1: mod_base = OTHER; note = 2'O-methyl adenosine phosphorothioate
  modified_base 2: mod_base = OTHER; note = 2'-fluoro guanosine phosphorothioate
  modified_base 3: mod_base = OTHER; note = 2'O-methyl guanosine
  modified_base 4: mod_base = OTHER; note = 2'O-methyl adenosine
  modified_base 5: mod_base = OTHER; note = 2'O-methyl adenosine
  modified_base 6: mod_base = OTHER; note = 2'-fluoro uridine
  modified_base 7: mod_base = OTHER; note = 2'O-methyl guanosine
  modified_base 8: mod_base = OTHER; note = 2'O-methyl adenosine
  modified_base 9: mod_base = OTHER; note = 2'O-methyl adenosine
  modified_base 10: mod_base = OTHER; note = 2'O-methyl adenosine
  modified_base 11: mod_base = OTHER; note = 2'O-methyl adenosine
  modified_base 12: mod_base = OTHER; note = 2'O-methyl adenosine
  modified_base 13: mod_base = OTHER; note = 2'O-methyl cytidine
  modified_base 14: mod_base = OTHER; note = 2'-fluoro uridine
  modified_base 15: mod_base = OTHER; note = 2'O-methyl uridine
  modified_base 16: mod_base = OTHER; note = 2'-fluoro cytidine
  modified_base 17: mod_base = OTHER; note = 2'O-methyl adenosine
  modified_base 18: mod_base = OTHER; note = 2'O-methyl cytidine
  modified_base 19: mod_base = OTHER; note = 2'O-methyl cytidine
  modified_base 20: mod_base = OTHER; note = 2'O-methyl adenosine
  modified_base 21: mod_base = OTHER; note = 2'O-methyl adenosine phosphorothioate
  modified_base 22: mod_base = OTHER; note = 2'O-methyl cytidine phosphorothioate
  modified_base 23: mod_base = OTHER; note = 2'O-methyl guanosine
aggaatgaaaaacttcaccaacg

SEQ ID NO: 614 - RNA, 23 nt, synthetic construct
  source 1..23: mol_type = other RNA
  modified_base 1: mod_base = OTHER; note = 2'O-methyl uridine phosphorothioate
  modified_base 2: mod_base = OTHER; note = 2'-fluoro adenosine phosphorothioate
  modified_base 3: mod_base = OTHER; note = 2'O-methyl adenosine
  modified_base 4: mod_base = OTHER; note = 2'O-methyl uridine
  modified_base 5: mod_base = OTHER; note = 2'O-methyl adenosine
  modified_base 6: mod_base = OTHER; note = 2'-fluoro uridine
  modified_base 7: mod_base = OTHER; note = 2'O-methyl cytidine
  modified_base 8: mod_base = OTHER; note = 2'O-methyl cytidine
  modified_base 9: mod_base = OTHER; note = 2'O-methyl cytidine
  modified_base 10: mod_base = OTHER; note = 2'O-methyl adenosine
  modified_base 11: mod_base = OTHER; note = 2'O-methyl cytidine
  modified_base 12: mod_base = OTHER; note = 2'O-methyl adenosine
  modified_base 13: mod_base = OTHER; note = 2'O-methyl guanosine
  modified_base 14: mod_base = OTHER; note = 2'-fluoro adenosine
  modified_base 15: mod_base = OTHER; note = 2'O-methyl adenosine
  modified_base 16: mod_base = OTHER; note = 2'-fluoro cytidine
  modified_base 17: mod_base = OTHER; note = 2'O-methyl cytidine
  modified_base 18: mod_base = OTHER; note = 2'O-methyl adenosine
  modified_base 19: mod_base = OTHER; note = 2'O-methyl adenosine
  modified_base 20: mod_base = OTHER; note = 2'O-methyl uridine
  modified_base 21: mod_base = OTHER; note = 2'O-methyl adenosine phosphorothioate
  modified_base 22: mod_base = OTHER; note = 2'O-methyl uridine phosphorothioate
  modified_base 23: mod_base = OTHER; note = 2'O-methyl guanosine
taatatcccacagaaccaatatg

SEQ ID NO: 615 - RNA, 23 nt, synthetic construct
  source 1..23: mol_type = other RNA
  modified_base 1: mod_base = OTHER; note = 5' vinyl phosphonate 2'O-methyl uridine phosphorothioate
  modified_base 2: mod_base = OTHER; note = 2'-fluoro adenosine phosphorothioate
  modified_base 3: mod_base = OTHER; note = 2'O-methyl adenosine
  modified_base 4: mod_base = OTHER; note = 2'O-methyl uridine
  modified_base 5: mod_base = OTHER; note = 2'O-methyl adenosine
  modified_base 6: mod_base = OTHER; note = 2'-fluoro uridine
  modified_base 7: mod_base = OTHER; note = 2'O-methyl cytidine
  modified_base 8: mod_base = OTHER; note = 2'O-methyl cytidine
  modified_base 9: mod_base = OTHER; note = 2'O-methyl cytidine
  modified_base 10: mod_base = OTHER; note = 2'O-methyl adenosine
  modified_base 11: mod_base = OTHER; note = 2'O-methyl cytidine
  modified_base 12: mod_base = OTHER; note = 2'O-methyl adenosine
  modified_base 13: mod_base = OTHER; note = 2'O-methyl guanosine
  modified_base 14: mod_base = OTHER; note = 2'-fluoro adenosine
  modified_base 15: mod_base = OTHER; note = 2'O-methyl adenosine
  modified_base 16: mod_base = OTHER; note = 2'-fluoro cytidine
  modified_base 17: mod_base = OTHER; note = 2'O-methyl cytidine
  modified_base 18: mod_base = OTHER; note = 2'O-methyl adenosine
  modified_base 19: mod_base = OTHER; note = 2'O-methyl adenosine
  modified_base 20: mod_base = OTHER; note = 2'O-methyl uridine
  modified_base 21: mod_base = OTHER; note = 2'O-methyl adenosine phosphorothioate
  modified_base 22: mod_base = OTHER; note = 2'O-methyl uridine phosphorothioate
  modified_base 23: mod_base = OTHER; note = 2'O-methyl guanosine
taatatcccacagaaccaatatg

SEQ ID NO: 616 - RNA, 23 nt, synthetic construct
  source 1..23: mol_type = other RNA
  modified_base 1: mod_base = OTHER; note = 5' vinyl phosphonate 2'O-methyl adenosine phosphorothioate
  modified_base 2: mod_base = OTHER; note = 2'-fluoro adenosine phosphorothioate
  modified_base 3: mod_base = OTHER; note = 2'O-methyl adenosine
  modified_base 4: mod_base = OTHER; note = 2'O-methyl uridine
  modified_base 5: mod_base = OTHER; note = 2'O-methyl adenosine
  modified_base 6: mod_base = OTHER; note = 2'-fluoro uridine
  modified_base 7: mod_base = OTHER; note = 2'O-methyl cytidine
  modified_base 8: mod_base = OTHER; note = 2'O-methyl cytidine
  modified_base 9: mod_base = OTHER; note = 2'O-methyl cytidine
  modified_base 10: mod_base = OTHER; note = 2'O-methyl adenosine
  modified_base 11: mod_base = OTHER; note = 2'O-methyl cytidine
  modified_base 12: mod_base = OTHER; note = 2'O-methyl adenosine
  modified_base 13: mod_base = OTHER; note = 2'O-methyl guanosine
  modified_base 14: mod_base = OTHER; note = 2'-fluoro adenosine
  modified_base 15: mod_base = OTHER; note = 2'O-methyl adenosine
  modified_base 16: mod_base = OTHER; note = 2'-fluoro cytidine
  modified_base 17: mod_base = OTHER; note = 2'O-methyl cytidine
  modified_base 18: mod_base = OTHER; note = 2'O-methyl adenosine
  modified_base 19: mod_base = OTHER; note = 2'O-methyl adenosine
  modified_base 20: mod_base = OTHER; note = 2'O-methyl uridine
  modified_base 21: mod_base = OTHER; note = 2'O-methyl adenosine phosphorothioate
  modified_base 22: mod_base = OTHER; note = 2'O-methyl uridine phosphorothioate
  modified_base 23: mod_base = OTHER; note = 2'O-methyl guanosine
aaatatcccacagaaccaatatg

SEQ ID NO: 617 - RNA, 23 nt, synthetic construct
  source 1..23: mol_type = other RNA
  modified_base 1: mod_base = OTHER; note = 2'O-methyl uridine phosphorothioate
  modified_base 2: mod_base = OTHER; note = 2'-fluoro uridine phosphorothioate
  modified_base 3: mod_base = OTHER; note = 2'O-methyl uridine
  modified_base 4: mod_base = OTHER; note = 2'O-methyl guanosine
  modified_base 5: mod_base = OTHER; note = 2'O-methyl adenosine
  modified_base 6: mod_base = OTHER; note = 2'-fluoro uridine
  modified_base 7: mod_base = OTHER; note = 2'O-methyl adenosine
  modified_base 8: mod_base = OTHER; note = 2'O-methyl cytidine
  modified_base 9: mod_base = OTHER; note = 2'O-methyl cytidine
  modified_base 10: mod_base = OTHER; note = 2'O-methyl adenosine
  modified_base 11: mod_base = OTHER; note = 2'O-methyl guanosine
  modified_base 12: mod_base = OTHER; note = 2'O-methyl uridine
  modified_base 13: mod_base = OTHER; note = 2'O-methyl uridine
  modified_base 14: mod_base = OTHER; note = 2'-fluoro uridine
  modified_base 15: mod_base = OTHER; note = 2'O-methyl uridine
  modified_base 16: mod_base = OTHER; note = 2'-fluoro uridine
  modified_base 17: mod_base = OTHER; note = 2'O-methyl cytidine
  modified_base 18: mod_base = OTHER; note = 2'O-methyl cytidine
  modified_base 19: mod_base = OTHER; note = 2'O-methyl cytidine
  modified_base 20: mod_base = OTHER; note = 2'O-methyl adenosine
  modified_base 21: mod_base = OTHER; note = 2'O-methyl adenosine phosphorothioate
  modified_base 22: mod_base = OTHER; note = 2'O-methyl guanosine phosphorothioate
  modified_base 23: mod_base = OTHER; note = 2'O-methyl guanosine
tttgataccagtttttcccaagg

SEQ ID NO: 618 - RNA, 23 nt, synthetic construct
  source 1..23: mol_type = other RNA
  modified_base 1: mod_base = OTHER; note = 5' vinyl phosphonate 2'O-methyl uridine phosphorothioate
  modified_base 2: mod_base = OTHER; note = 2'-fluoro uridine phosphorothioate
  modified_base 3: mod_base = OTHER; note = 2'O-methyl uridine
  modified_base 4: mod_base = OTHER; note = 2'O-methyl guanosine
  modified_base 5: mod_base = OTHER; note = 2'O-methyl adenosine
  modified_base 6: mod_base = OTHER; note = 2'-fluoro uridine
  modified_base 7: mod_base = OTHER; note = 2'O-methyl adenosine
  modified_base 8: mod_base = OTHER; note = 2'O-methyl cytidine
  modified_base 9: mod_base = OTHER; note = 2'O-methyl cytidine
  modified_base 10: mod_base = OTHER; note = 2'O-methyl adenosine
  modified_base 11: mod_base = OTHER; note = 2'O-methyl guanosine
  modified_base 12: mod_base = OTHER; note = 2'O-methyl uridine
  modified_base 13: mod_base = OTHER; note = 2'O-methyl uridine
  modified_base 14: mod_base = OTHER; note = 2'-fluoro uridine
  modified_base 15: mod_base = OTHER; note = 2'O-methyl uridine
  modified_base 16: mod_base = OTHER; note = 2'-fluoro uridine
  modified_base 17: mod_base = OTHER; note = 2'O-methyl cytidine
  modified_base 18: mod_base = OTHER; note = 2'O-methyl cytidine
  modified_base 19: mod_base = OTHER; note = 2'O-methyl cytidine
  modified_base 20: mod_base = OTHER; note = 2'O-methyl adenosine
  modified_base 21: mod_base = OTHER; note = 2'O-methyl adenosine phosphorothioate
  modified_base 22: mod_base = OTHER; note = 2'O-methyl guanosine phosphorothioate
  modified_base 23: mod_base = OTHER; note = 2'O-methyl guanosine
tttgataccagtttttcccaagg

SEQ ID NO: 619 - RNA, 23 nt, synthetic construct
  source 1..23: mol_type = other RNA
  modified_base 1: mod_base = OTHER; note = 5' vinyl phosphonate 2'O-methyl adenosine phosphorothioate
  modified_base 2: mod_base = OTHER; note = 2'-fluoro uridine phosphorothioate
  modified_base 3: mod_base = OTHER; note = 2'O-methyl uridine
  modified_base 4: mod_base = OTHER; note = 2'O-methyl guanosine
  modified_base 5: mod_base = OTHER; note = 2'O-methyl adenosine
  modified_base 6: mod_base = OTHER; note = 2'-fluoro uridine
  modified_base 7: mod_base = OTHER; note = 2'O-methyl adenosine
  modified_base 8: mod_base = OTHER; note = 2'O-methyl cytidine
  modified_base 9: mod_base = OTHER; note = 2'O-methyl cytidine
  modified_base 10: mod_base = OTHER; note = 2'O-methyl adenosine
  modified_base 11: mod_base = OTHER; note = 2'O-methyl guanosine
  modified_base 12: mod_base = OTHER; note = 2'O-methyl uridine
  modified_base 13: mod_base = OTHER; note = 2'O-methyl uridine
  modified_base 14: mod_base = OTHER; note = 2'-fluoro uridine
  modified_base 15: mod_base = OTHER; note = 2'O-methyl uridine
  modified_base 16: mod_base = OTHER; note = 2'-fluoro uridine
  modified_base 17: mod_base = OTHER; note = 2'O-methyl cytidine
  modified_base 18: mod_base = OTHER; note = 2'O-methyl cytidine
  modified_base 19: mod_base = OTHER; note = 2'O-methyl cytidine
  modified_base 20: mod_base = OTHER; note = 2'O-methyl adenosine
  modified_base 21: mod_base = OTHER; note = 2'O-methyl adenosine phosphorothioate
  modified_base 22: mod_base = OTHER; note = 2'O-methyl guanosine phosphorothioate
  modified_base 23: mod_base = OTHER; note = 2'O-methyl guanosine
attgataccagtttttcccaagg

SEQ ID NO: 620 - RNA, 23 nt, synthetic construct
  source 1..23: mol_type = other RNA
  modified_base 1: mod_base = OTHER; note = 2'O-methyl adenosine phosphorothioate
  modified_base 2: mod_base = OTHER; note = 2'-fluoro adenosine phosphorothioate
  modified_base 3: mod_base = OTHER; note = 2'O-methyl adenosine
  modified_base 4: mod_base = OTHER; note = 2'O-methyl adenosine
  modified_base 5: mod_base = OTHER; note = 2'O-methyl adenosine
  modified_base 6: mod_base = OTHER; note = 2'-fluoro uridine
  modified_base 7: mod_base = OTHER; note = 2'O-methyl cytidine
  modified_base 8: mod_base = OTHER; note = 2'O-methyl adenosine
  modified_base 9: mod_base = OTHER; note = 2'O-methyl uridine
  modified_base 10: mod_base = OTHER; note = 2'O-methyl uridine
  modified_base 11: mod_base = OTHER; note = 2'O-methyl uridine
  modified_base 12: mod_base = OTHER; note = 2'O-methyl uridine
  modified_base 13: mod_base = OTHER; note = 2'O-methyl cytidine
  modified_base 14: mod_base = OTHER; note = 2'-fluoro uridine
  modified_base 15: mod_base = OTHER; note = 2'O-methyl uridine
  modified_base 16: mod_base = OTHER; note = 2'-fluoro adenosine
  modified_base 17: mod_base = OTHER; note = 2'O-methyl uridine
  modified_base 18: mod_base = OTHER; note = 2'O-methyl uridine
  modified_base 19: mod_base = OTHER; note = 2'O-methyl guanosine
  modified_base 20: mod_base = OTHER; note = 2'O-methyl guanosine
  modified_base 21: mod_base = OTHER; note = 2'O-methyl uridine phosphorothioate
  modified_base 22: mod_base = OTHER; note = 2'O-methyl adenosine phosphorothioate
  modified_base 23: mod_base = OTHER; note = 2'O-methyl adenosine
aaaaatcattttcttattggtaa

SEQ ID NO: 621 - RNA, 23 nt, synthetic construct
  source 1..23: mol_type = other RNA
  modified_base 1: mod_base = OTHER; note = 5' vinyl phosphonate 2'O-methyl adenosine phosphorothioate
  modified_base 2: mod_base = OTHER; note = 2'-fluoro adenosine phosphorothioate
  modified_base 3: mod_base = OTHER; note = 2'O-methyl adenosine
  modified_base 4: mod_base = OTHER; note = 2'O-methyl adenosine
  modified_base 5: mod_base = OTHER; note = 2'O-methyl adenosine
  modified_base 6: mod_base = OTHER; note = 2'-fluoro uridine
  modified_base 7: mod_base = OTHER; note = 2'O-methyl cytidine
  modified_base 8: mod_base = OTHER; note = 2'O-methyl adenosine
  modified_base 9: mod_base = OTHER; note = 2'O-methyl uridine
  modified_base 10: mod_base = OTHER; note = 2'O-methyl uridine
  modified_base 11: mod_base = OTHER; note = 2'O-methyl uridine
  modified_base 12: mod_base = OTHER; note = 2'O-methyl uridine
  modified_base 13: mod_base = OTHER; note = 2'O-methyl cytidine
  modified_base 14: mod_base = OTHER; note = 2'-fluoro uridine
  modified_base 15: mod_base = OTHER; note = 2'O-methyl uridine
  modified_base 16: mod_base = OTHER; note = 2'-fluoro adenosine
  modified_base 17: mod_base = OTHER; note = 2'O-methyl uridine
  modified_base 18: mod_base = OTHER; note = 2'O-methyl uridine
  modified_base 19: mod_base = OTHER; note = 2'O-methyl guanosine
  modified_base 20: mod_base = OTHER; note = 2'O-methyl guanosine
  modified_base 21: mod_base = OTHER; note = 2'O-methyl uridine phosphorothioate
  modified_base 22: mod_base = OTHER; note = 2'O-methyl adenosine phosphorothioate
  modified_base 23: mod_base = OTHER; note = 2'O-methyl adenosine
aaaaatcattttcttattggtaa

SEQ ID NO: 622 - RNA, 23 nt, synthetic construct
  source 1..23: mol_type = other RNA
  modified_base 1: mod_base = OTHER; note = 5' vinyl phosphonate 2'O-methyl uridine phosphorothioate
  modified_base 2: mod_base = OTHER; note = 2'-fluoro adenosine phosphorothioate
  modified_base 3: mod_base = OTHER; note = 2'O-methyl adenosine
  modified_base 4: mod_base = OTHER; note = 2'O-methyl adenosine
  modified_base 5: mod_base = OTHER; note = 2'O-methyl adenosine
  modified_base 6: mod_base = OTHER; note = 2'-fluoro uridine
  modified_base 7: mod_base = OTHER; note = 2'O-methyl cytidine
  modified_base 8: mod_base = OTHER; note = 2'O-methyl adenosine
  modified_base 9: mod_base = OTHER; note = 2'O-methyl uridine
  modified_base 10: mod_base = OTHER; note = 2'O-methyl uridine
  modified_base 11: mod_base = OTHER; note = 2'O-methyl uridine
  modified_base 12: mod_base = OTHER; note = 2'O-methyl uridine
  modified_base 13: mod_base = OTHER; note = 2'O-methyl cytidine
  modified_base 14: mod_base = OTHER; note = 2'-fluoro uridine
  modified_base 15: mod_base = OTHER; note = 2'O-methyl uridine
  modified_base 16: mod_base = OTHER; note = 2'-fluoro adenosine
  modified_base 17: mod_base = OTHER; note = 2'O-methyl uridine
  modified_base 18: mod_base = OTHER; note = 2'O-methyl uridine
  modified_base 19: mod_base = OTHER; note = 2'O-methyl guanosine
  modified_base 20: mod_base = OTHER; note = 2'O-methyl guanosine
  modified_base 21: mod_base = OTHER; note = 2'O-methyl uridine phosphorothioate
  modified_base 22: mod_base = OTHER; note = 2'O-methyl adenosine phosphorothioate
  modified_base 23: mod_base = OTHER; note = 2'O-methyl adenosine
taaaatcattttcttattggtaa

SEQ ID NO: 623 - RNA, 23 nt, synthetic construct
  source 1..23: mol_type = other RNA
  modified_base 1: mod_base = OTHER; note = 2'O-methyl adenosine phosphorothioate
  modified_base 2: mod_base = OTHER; note = 2'-fluoro guanosine phosphorothioate
  modified_base 3: mod_base = OTHER; note = 2'O-methyl adenosine
  modified_base 4: mod_base = OTHER; note = 2'O-methyl cytidine
  modified_base 5: mod_base = OTHER; note = 2'O-methyl adenosine
  modified_base 6: mod_base = OTHER; note = 2'-fluoro uridine
  modified_base 7: mod_base = OTHER; note = 2'O-methyl guanosine
  modified_base 8: mod_base = OTHER; note = 2'O-methyl adenosine
  modified_base 9: mod_base = OTHER; note = 2'O-methyl guanosine
  modified_base 10: mod_base = OTHER; note = 2'O-methyl guanosine
  modified_base 11: mod_base = OTHER; note = 2'O-methyl uridine
  modified_base 12: mod_base = OTHER; note = 2'O-methyl uridine
  modified_base 13: mod_base = OTHER; note = 2'O-methyl uridine
  modified_base 14: mod_base = OTHER; note = 2'-fluoro uridine
  modified_base 15: mod_base = OTHER; note = 2'O-methyl guanosine
  modified_base 16: mod_base = OTHER; note = 2'-fluoro adenosine
  modified_base 17: mod_base = OTHER; note = 2'O-methyl uridine
  modified_base 18: mod_base = OTHER; note = 2'O-methyl adenosine
  modified_base 19: mod_base = OTHER; note = 2'O-methyl cytidine
  modified_base 20: mod_base = OTHER; note = 2'O-methyl cytidine
  modified_base 21: mod_base = OTHER; note = 2'O-methyl adenosine phosphorothioate
  modified_base 22: mod_base = OTHER; note = 2'O-methyl uridine phosphorothioate
  modified_base 23: mod_base = OTHER; note = 2'O-methyl uridine
agacatgaggttttgataccatt

SEQ ID NO: 624 - RNA, 23 nt, synthetic construct
  source 1..23: mol_type = other RNA
  modified_base 1: mod_base = OTHER; note = 5' vinyl phosphonate 2'O-methyl adenosine phosphorothioate
  modified_base 2: mod_base = OTHER; note = 2'-fluoro guanosine phosphorothioate
  modified_base 3: mod_base = OTHER; note = 2'O-methyl adenosine
  modified_base 4: mod_base = OTHER; note = 2'O-methyl cytidine
  modified_base 5: mod_base = OTHER; note = 2'O-methyl adenosine
  modified_base 6: mod_base = OTHER; note = 2'-fluoro uridine
  modified_base 7: mod_base = OTHER; note = 2'O-methyl guanosine
  modified_base 8: mod_base = OTHER; note = 2'O-methyl adenosine
  modified_base 9: mod_base = OTHER; note = 2'O-methyl guanosine
  modified_base 10: mod_base = OTHER; note = 2'O-methyl guanosine
  modified_base 11: mod_base = OTHER; note = 2'O-methyl uridine
  modified_base 12: mod_base = OTHER; note = 2'O-methyl uridine
  modified_base 13: mod_base = OTHER; note = 2'O-methyl uridine
  modified_base 14: mod_base = OTHER; note = 2'-fluoro uridine
  modified_base 15: mod_base = OTHER; note = 2'O-methyl guanosine
  modified_base 16: mod_base = OTHER; note = 2'-fluoro adenosine
  modified_base 17: mod_base = OTHER; note = 2'O-methyl uridine
  modified_base 18: mod_base = OTHER; note = 2'O-methyl adenosine
  modified_base 19: mod_base = OTHER; note = 2'O-methyl cytidine
  modified_base 20: mod_base = OTHER; note = 2'O-methyl cytidine
  modified_base 21: mod_base = OTHER; note = 2'O-methyl adenosine phosphorothioate
  modified_base 22: mod_base = OTHER; note = 2'O-methyl guanosine phosphorothioate
  modified_base 23: mod_base = OTHER; note = 2'O-methyl uridine
agacatgaggttttgataccagt

SEQ ID NO: 625 - RNA, 23 nt, synthetic construct
  source 1..23: mol_type = other RNA
  modified_base 1: mod_base = OTHER; note = 2'O-methyl adenosine phosphorothioate
  modified_base 2: mod_base = OTHER; note = 2'-fluoro guanosine phosphorothioate
  modified_base 3: mod_base = OTHER; note = 2'O-methyl adenosine
  modified_base 4: mod_base = OTHER; note = 2'O-methyl guanosine
  modified_base 5: mod_base = OTHER; note = 2'O-methyl adenosine
  modified_base 6: mod_base = OTHER; note = 2'-fluoro cytidine
  modified_base 7: mod_base = OTHER; note = 2'O-methyl adenosine
  modified_base 8: mod_base = OTHER; note = 2'O-methyl uridine
  modified_base 9: mod_base = OTHER; note = 2'O-methyl guanosine
  modified_base 10: mod_base = OTHER; note = 2'O-methyl adenosine
  modified_base 11: mod_base = OTHER; note = 2'O-methyl guanosine
  modified_base 12: mod_base = OTHER; note = 2'O-methyl guanosine
  modified_base 13: mod_base = OTHER; note = 2'O-methyl uridine
  modified_base 14: mod_base = OTHER; note = 2'-fluoro uridine
  modified_base 15: mod_base = OTHER; note = 2'O-methyl uridine
  modified_base 16: mod_base = OTHER; note = 2'-fluoro uridine
  modified_base 17: mod_base = OTHER; note = 2'O-methyl guanosine
  modified_base 18: mod_base = OTHER; note = 2'O-methyl adenosine
  modified_base 19: mod_base = OTHER; note = 2'O-methyl uridine
  modified_base 20: mod_base = OTHER; note = 2'O-methyl adenosine
  modified_base 21: mod_base = OTHER; note = 2'O-methyl cytidine phosphorothioate
  modified_base 22: mod_base = OTHER; note = 2'O-methyl uridine phosphorothioate
  modified_base 23: mod_base = OTHER; note = 2'O-methyl uridine
agagacatgaggttttgatactt

SEQ ID NO: 626 - RNA, 23 nt, synthetic construct
  source 1..23: mol_type = other RNA
  modified_base 1: mod_base = OTHER; note = 2'O-methyl adenosine phosphorothioate
  modified_base 2: mod_base = OTHER; note = 2'-fluoro guanosine phosphorothioate
  modified_base 3: mod_base = OTHER; note = 2'O-methyl adenosine
  modified_base 4: mod_base = OTHER; note = 2'O-methyl guanosine
  modified_base 5: mod_base = OTHER; note = 2'O-methyl adenosine
  modified_base 6: mod_base = OTHER; note = 2'-fluoro cytidine
  modified_base 7: mod_base = OTHER; note = 2'O-methyl adenosine
  modified_base 8: mod_base = OTHER; note = 2'O-methyl uridine
  modified_base 9: mod_base = OTHER; note = 2'O-methyl guanosine
  modified_base 10: mod_base = OTHER; note = 2'O-methyl adenosine
  modified_base 11: mod_base = OTHER; note = 2'O-methyl guanosine
  modified_base 12: mod_base = OTHER; note = 2'O-methyl guanosine
  modified_base 13: mod_base = OTHER; note = 2'O-methyl uridine
  modified_base 14: mod_base = OTHER; note = 2'-fluoro uridine
  modified_base 15: mod_base = OTHER; note = 2'O-methyl uridine
  modified_base 16: mod_base = OTHER; note = 2'-fluoro uridine
  modified_base 17: mod_base = OTHER; note = 2'O-methyl guanosine
  modified_base 18: mod_base = OTHER; note = 2'O-methyl adenosine
  modified_base 19: mod_base = OTHER; note = 2'O-methyl uridine
  modified_base 20: mod_base = OTHER; note = 2'O-methyl adenosine
  modified_base 21: mod_base = OTHER; note = 2'O-methyl cytidine phosphorothioate
  modified_base 22: mod_base = OTHER; note = 2'O-methyl cytidine phosphorothioate
  modified_base 23: mod_base = OTHER; note = 2'O-methyl adenosine
agagacatgaggttttgatacca

SEQ ID NO: 627 - RNA, 23 nt, synthetic construct
  source 1..23: mol_type = other RNA
  modified_base 1: mod_base = OTHER; note = 5' vinyl phosphonate 2'O-methyl adenosine phosphorothioate
  modified_base 2: mod_base = OTHER; note = 2'-fluoro guanosine phosphorothioate
  modified_base 3: mod_base = OTHER; note = 2'O-methyl adenosine
  modified_base 4: mod_base = OTHER; note = 2'O-methyl guanosine
  modified_base 5: mod_base = OTHER; note = 2'O-methyl adenosine
  modified_base 6: mod_base = OTHER; note = 2'-fluoro cytidine
  modified_base 7: mod_base = OTHER; note = 2'O-methyl adenosine
  modified_base 8: mod_base = OTHER; note = 2'O-methyl uridine
  modified_base 9: mod_base = OTHER; note = 2'O-methyl guanosine
  modified_base 10: mod_base = OTHER; note = 2'O-methyl adenosine
  modified_base 11: mod_base = OTHER; note = 2'O-methyl guanosine
  modified_base 12: mod_base = OTHER; note = 2'O-methyl guanosine
  modified_base 13: mod_base = OTHER; note = 2'O-methyl uridine
  modified_base 14: mod_base = OTHER; note = 2'-fluoro uridine
  modified_base 15: mod_base = OTHER; note = 2'O-methyl uridine
  modified_base 16: mod_base = OTHER; note = 2'-fluoro uridine
  modified_base 17: mod_base = OTHER; note = 2'O-methyl guanosine
  modified_base 18: mod_base = OTHER; note = 2'O-methyl adenosine
  modified_base 19: mod_base = OTHER; note = 2'O-methyl uridine
  modified_base 20: mod_base = OTHER; note = 2'O-methyl adenosine
  modified_base 21: mod_base = OTHER; note = 2'O-methyl cytidine phosphorothioate
  modified_base 22: mod_base = OTHER; note = 2'O-methyl cytidine phosphorothioate
  modified_base 23: mod_base = OTHER; note = 2'O-methyl adenosine
agagacatgaggttttgatacca

SEQ ID NO: 628 - RNA, 23 nt, synthetic construct
  source 1..23: mol_type = other RNA
  modified_base 1: mod_base = OTHER; note = 5' vinyl phosphonate 2'O-methyl uridine phosphorothioate
  modified_base 2: mod_base = OTHER; note = 2'-fluoro guanosine phosphorothioate
  modified_base 3: mod_base = OTHER; note = 2'O-methyl adenosine
  modified_base 4: mod_base = OTHER; note = 2'O-methyl guanosine
  modified_base 5: mod_base = OTHER; note = 2'O-methyl adenosine
  modified_base 6: mod_base = OTHER; note = 2'-fluoro cytidine
  modified_base 7: mod_base = OTHER; note = 2'O-methyl adenosine
  modified_base 8: mod_base = OTHER; note = 2'O-methyl uridine
  modified_base 9: mod_base = OTHER; note = 2'O-methyl guanosine
  modified_base 10: mod_base = OTHER; note = 2'O-methyl adenosine
  modified_base 11: mod_base = OTHER; note = 2'O-methyl guanosine
  modified_base 12: mod_base = OTHER; note = 2'O-methyl guanosine
  modified_base 13: mod_base = OTHER; note = 2'O-methyl uridine
  modified_base 14: mod_base = OTHER; note = 2'-fluoro uridine
  modified_base 15: mod_base = OTHER; note = 2'O-methyl uridine
  modified_base 16: mod_base = OTHER; note = 2'-fluoro uridine
  modified_base 17: mod_base = OTHER; note = 2'O-methyl guanosine
  modified_base 18: mod_base = OTHER; note = 2'O-methyl adenosine
  modified_base 19: mod_base = OTHER; note = 2'O-methyl uridine
  modified_base 20: mod_base = OTHER; note = 2'O-methyl adenosine
  modified_base 21: mod_base = OTHER; note = 2'O-methyl cytidine phosphorothioate
  modified_base 22: mod_base = OTHER; note = 2'O-methyl cytidine phosphorothioate
  modified_base 23: mod_base = OTHER; note = 2'O-methyl adenosine
tgagacatgaggttttgatacca

SEQ ID NO: 629 - RNA, 23 nt, synthetic construct
  source 1..23: mol_type = other RNA
  modified_base 1: mod_base = OTHER; note = 2'O-methyl adenosine phosphorothioate
  modified_base 2: mod_base = OTHER; note = 2'-fluoro uridine phosphorothioate
  modified_base 3: mod_base = OTHER; note = 2'O-methyl cytidine
  modified_base 4: mod_base = OTHER; note = 2'O-methyl adenosine
  modified_base 5: mod_base = OTHER; note = 2'O-methyl guanosine
  modified_base 6: mod_base = OTHER; note = 2'-fluoro adenosine
  modified_base 7: mod_base = OTHER; note = 2'O-methyl cytidine
  modified_base 8: mod_base = OTHER; note = 2'O-methyl uridine
  modified_base 9: mod_base = OTHER; note = 2'O-methyl uridine
  modified_base 10: mod_base = OTHER; note = 2'O-methyl cytidine
  modified_base 11: mod_base = OTHER; note = 2'O-methyl uridine
  modified_base 12: mod_base = OTHER; note = 2'O-methyl uridine
  modified_base 13: mod_base = OTHER; note = 2'O-methyl adenosine
  modified_base 14: mod_base = OTHER; note = 2'-fluoro cytidine
  modified_base 15: mod_base = OTHER; note = 2'O-methyl guanosine
  modified_base 16: mod_base = OTHER; note = 2'-fluoro adenosine
  modified_base 17: mod_base = OTHER; note = 2'O-methyl cytidine
  modified_base 18: mod_base = OTHER; note = 2'O-methyl uridine
  modified_base 19: mod_base = OTHER; note = 2'O-methyl uridine
  modified_base 20: mod_base = OTHER; note = 2'O-methyl cytidine
  modified_base 21: mod_base = OTHER; note = 2'O-methyl adenosine phosphorothioate
  modified_base 22: mod_base = OTHER; note = 2'O-methyl uridine phosphorothioate
  modified_base 23: mod_base = OTHER; note = 2'O-methyl uridine
atcagacttcttacgacttcatt

SEQ ID NO: 630 - RNA, 21 nt, synthetic construct
  source 1..21: mol_type = other RNA
  modified_base 1: mod_base = OTHER; note = 5'vinyl phosphonate 2'O-methyladenosine phosphorothioate
  modified_base 2: mod_base = OTHER; note = 2'-fluoroguanosine phosphorothioate
  modified_base 3: mod_base = OTHER; note = 2'O-methylguanosine
  modified_base 4: mod_base = OTHER; note = 2'O-methyladenosine
  modified_base 5: mod_base = OTHER; note = 2'O-methyladenosine
  modified_base 6: mod_base = OTHER; note = 2'-fluorouridine
  modified_base 7: mod_base = OTHER; note = 2',3'-seco nucleotide guanosine
  modified_base 8: mod_base = OTHER; note = 2'O-methyladenosine
  modified_base 9: mod_base = OTHER; note = 2'O-methyladenosine
  modified_base 10: mod_base = OTHER; note = 2'O-methyladenosine
  modified_base 11: mod_base = OTHER; note = 2'O-methyladenosine
  modified_base 12: mod_base = OTHER; note = 2'O-methyladenosine
  modified_base 13: mod_base = OTHER; note = 2'O-methylcytidine
  modified_base 14: mod_base = OTHER; note = 2'-fluorouridine
  modified_base 15: mod_base = OTHER; note = 2'O-methyluridine
  modified_base 16: mod_base = OTHER; note = 2'-fluorocytidine
  modified_base 17: mod_base = OTHER; note = 2'O-methyladenosine
  modified_base 18: mod_base = OTHER; note = 2'O-methylcytidine
  modified_base 19: mod_base = OTHER; note = 2'O-methylcytidine phosphorothioate
  modified_base 20: mod_base = OTHER; note = 2'O-methyladenosine phosphorothioate
  modified_base 21: mod_base = OTHER; note = 2'O-methyladenosine
aggaatgaaaaacttcaccaa

SEQ ID NO: 631 - RNA, 21 nt, synthetic construct
  source 1..21: mol_type = other RNA
  modified_base 1: mod_base = OTHER; note = 5'vinyl phosphonate 2'O-methyladenosine phosphorothioate
  modified_base 2: mod_base = OTHER; note = 2'-fluoroguanosine phosphorothioate
  modified_base 3: mod_base = OTHER; note = 2'O-methylguanosine
  modified_base 4: mod_base = OTHER; note = 2'O-methyladenosine
  modified_base 5: mod_base = OTHER; note = 2'O-methyladenosine
  modified_base 6: mod_base = OTHER; note = 2'-fluorouridine
  modified_base 7: mod_base = OTHER; note = 2'O-methyl-3',4'-seco-guanosine
  modified_base 8: mod_base = OTHER; note = 2'O-methyladenosine
  modified_base 9: mod_base = OTHER; note = 2'O-methyladenosine
  modified_base 10: mod_base = OTHER; note = 2'O-methyladenosine
  modified_base 11: mod_base = OTHER; note = 2'O-methyladenosine
  modified_base 12: mod_base = OTHER; note = 2'O-methyladenosine
  modified_base 13: mod_base = OTHER; note = 2'O-methylcytidine
  modified_base 14: mod_base = OTHER; note = 2'-fluorouridine
  modified_base 15: mod_base = OTHER; note = 2'O-methyluridine
  modified_base 16: mod_base = OTHER; note = 2'-fluorocytidine
  modified_base 17: mod_base = OTHER; note = 2'O-methyladenosine
  modified_base 18: mod_base = OTHER; note = 2'O-methylcytidine
  modified_base 19: mod_base = OTHER; note = 2'O-methylcytidine phosphorothioate
  modified_base 20: mod_base = OTHER; note = 2'O-methyladenosine phosphorothioate
  modified_base 21: mod_base = OTHER; note = 2'O-methyladenosine
aggaatgaaaaacttcaccaa

SEQ ID NO: 632 - RNA, 21 nt, synthetic construct
  source 1..21: mol_type = other RNA
  modified_base 1: mod_base = OTHER; note = 2'O-methyl-2',3'-unlocked ribo -5'-vinyl uridine phosphorothioate
  modified_base 2: mod_base = OTHER; note = 2'-fluoroguanosine phosphorothioate
  modified_base 3: mod_base = OTHER; note = 2'O-methylguanosine
  modified_base 4: mod_base = OTHER; note = 2'O-methyladenosine
  modified_base 5: mod_base = OTHER; note = 2'O-methyladenosine
  modified_base 6: mod_base = OTHER; note = 2'-fluorouridine
  modified_base 7: mod_base = OTHER; note = 2'O-methylguanosine
  modified_base 8: mod_base = OTHER; note = 2'O-methyladenosine
  modified_base 9: mod_base = OTHER; note = 2'O-methyladenosine
  modified_base 10: mod_base = OTHER; note = 2'O-methyladenosine
  modified_base 11: mod_base = OTHER; note = 2'O-methyladenosine
  modified_base 12: mod_base = OTHER; note = 2'O-methyladenosine
  modified_base 13: mod_base = OTHER; note = 2'O-methylcytidine
  modified_base 14: mod_base = OTHER; note = 2'-fluorouridine
  modified_base 15: mod_base = OTHER; note = 2'O-methyluridine
  modified_base 16: mod_base = OTHER; note = 2'-fluorocytidine
  modified_base 17: mod_base = OTHER; note = 2'O-methyladenosine
  modified_base 18: mod_base = OTHER; note = 2'O-methylcytidine
  modified_base 19: mod_base = OTHER; note = 2'O-methylcytidine phosphorothioate
  modified_base 20: mod_base = OTHER; note = 2'O-methyladenosine phosphorothioate
  modified_base 21: mod_base = OTHER; note = 2'O-methyladenosine
tggaatgaaaaacttcaccaa

SEQ ID NO: 633 - RNA, 21 nt, synthetic construct
  source 1..21: mol_type = other RNA
  modified_base 1: mod_base = OTHER; note = 3'-Oxymethyl-TNA uridine phosphonate phosphorothioate
  modified_base 2: mod_base = OTHER; note = 2'-fluoroguanosine phosphorothioate
  modified_base 3: mod_base = OTHER; note = 2'O-methylguanosine
  modified_base 4: mod_base = OTHER; note = 2'O-methyladenosine
  modified_base 5: mod_base = OTHER; note = 2'O-methyladenosine
  modified_base 6: mod_base = OTHER; note = 2'-fluorouridine
  modified_base 7: mod_base = OTHER; note = 2'O-methylguanosine
  modified_base 8: mod_base = OTHER; note = 2'O-methyladenosine
  modified_base 9: mod_base = OTHER; note = 2'O-methyladenosine
  modified_base 10: mod_base = OTHER; note = 2'O-methyladenosine
  modified_base 11: mod_base = OTHER; note = 2'O-methyladenosine
  modified_base 12: mod_base = OTHER; note = 2'O-methyladenosine
  modified_base 13: mod_base = OTHER; note = 2'O-methylcytidine
  modified_base 14: mod_base = OTHER; note = 2'-fluorouridine
  modified_base 15: mod_base = OTHER; note = 2'O-methyluridine
  modified_base 16: mod_base = OTHER; note = 2'-fluorocytidine
  modified_base 17: mod_base = OTHER; note = 2'O-methyladenosine
  modified_base 18: mod_base = OTHER; note = 2'O-methylcytidine
  modified_base 19: mod_base = OTHER; note = 2'O-methylcytidine phosphorothioate
  modified_base 20: mod_base = OTHER; note = 2'O-methyladenosine phosphorothioate
  modified_base 21: mod_base = OTHER; note = 2'O-methyladenosine
tggaatgaaaaacttcaccaa

SEQ ID NO: 634 - RNA, 21 nt, synthetic construct
  source 1..21: mol_type = other RNA
  modified_base 1: mod_base = OTHER; note = Threo-nucleic acid (TNA) phosphonate uridine phosphorothioate
  modified_base 2: mod_base = OTHER; note = 2'-fluoroguanosine phosphorothioate
  modified_base 3: mod_base = OTHER; note = 2'O-methylguanosine
  modified_base 4: mod_base = OTHER; note = 2'O-methyladenosine
  modified_base 5: mod_base = OTHER; note = 2'O-methyladenosine
  modified_base 6: mod_base = OTHER; note = 2'-fluorouridine
  modified_base 7: mod_base = OTHER; note = 2'O-methylguanosine
  modified_base 8: mod_base = OTHER; note = 2'O-methyladenosine
  modified_base 9: mod_base = OTHER; note = 2'O-methyladenosine
  modified_base 10: mod_base = OTHER; note = 2'O-methyladenosine
  modified_base 11: mod_base = OTHER; note = 2'O-methyladenosine
  modified_base 12: mod_base = OTHER; note = 2'O-methyladenosine
  modified_base 13: mod_base = OTHER; note = 2'O-methylcytidine
  modified_base 14: mod_base = OTHER; note = 2'-fluorouridine
  modified_base 15: mod_base = OTHER; note = 2'O-methyluridine
  modified_base 16: mod_base = OTHER; note = 2'-fluorocytidine
  modified_base 17: mod_base = OTHER; note = 2'O-methyladenosine
  modified_base 18: mod_base = OTHER; note = 2'O-methylcytidine
  modified_base 19: mod_base = OTHER; note = 2'O-methylcytidine phosphorothioate
  modified_base 20: mod_base = OTHER; note = 2'O-methyladenosine phosphorothioate
  modified_base 21: mod_base = OTHER; note = 2'O-methyladenosine
tggaatgaaaaacttcaccaa

SEQ ID NO: 635 - RNA, 23 nt, synthetic construct
  source 1..23: mol_type = other RNA
  modified_base 1: mod_base = OTHER; note = 2'O-methyl-2',3'-unlocked ribo -5'-vinyl uridine phosphorothioate
  modified_base 2: mod_base = OTHER; note = 2'-fluoroadenosine phosphorothioate
  modified_base 3: mod_base = OTHER; note = 2'O-methyladenosine
  modified_base 4: mod_base = OTHER; note = 2'O-methyladenosine
  modified_base 5: mod_base = OTHER; note = 2'O-methyladenosine
  modified_base 6: mod_base = OTHER; note = 2'-fluorouridine
  modified_base 7: mod_base = OTHER; note = 2'O-methylcytidine
  modified_base 8: mod_base = OTHER; note = 2'O-methyladenosine
  modified_base 9: mod_base = OTHER; note = 2'O-methyluridine
  modified_base 10: mod_base = OTHER; note = 2'O-methyluridine
  modified_base 11: mod_base = OTHER; note = 2'O-methyluridine
  modified_base 12: mod_base = OTHER; note = 2'O-methyluridine
  modified_base 13: mod_base = OTHER; note = 2'O-methylcytidine
  modified_base 14: mod_base = OTHER; note = 2'-fluorouridine
  modified_base 15: mod_base = OTHER; note = 2'O-methyluridine
  modified_base 16: mod_base = OTHER; note = 2'-fluoroadenosine
  modified_base 17: mod_base = OTHER; note = 2'O-methyluridine
  modified_base 18: mod_base = OTHER; note = 2'O-methyluridine
  modified_base 19: mod_base = OTHER; note = 2'O-methylguanosine
  modified_base 20: mod_base = OTHER; note = 2'O-methylguanosine
  modified_base 21: mod_base = OTHER; note = 2'O-methyluridine phosphorothioate
  modified_base 22: mod_base = OTHER; note = 2'O-methyladenosine phosphorothioate
  modified_base 23: mod_base = OTHER; note = 2'O-methyladenosine
taaaatcattttcttattggtaa

SEQ ID NO: 636 - RNA, 23 nt, synthetic construct
  source 1..23: mol_type = other RNA
  modified_base 1: mod_base = OTHER; note = 3'-Oxymethyle-TNA uridine phosphonate phosphorothioate
  modified_base 2: mod_base = OTHER; note = 2'-fluoroadenosine phosphorothioate
  modified_base 3: mod_base = OTHER; note = 2'O-methyladenosine
  modified_base 4: mod_base = OTHER; note = 2'O-methyladenosine
  modified_base 5: mod_base = OTHER; note = 2'O-methyladenosine
  modified_base 6: mod_base = OTHER; note = 2'-fluorouridine
  modified_base 7: mod_base = OTHER; note = 2'O-methylcytidine
  modified_base 8: mod_base = OTHER; note = 2'O-methyladenosine
  modified_base 9: mod_base = OTHER; note = 2'O-methyluridine
  modified_base 10: mod_base = OTHER; note = 2'O-methyluridine
  modified_base 11: mod_base = OTHER; note = 2'O-methyluridine
  modified_base 12: mod_base = OTHER; note = 2'O-methyluridine
  modified_base 13: mod_base = OTHER; note = 2'O-methylcytidine
  modified_base 14: mod_base = OTHER; note = 2'-fluorouridine
  modified_base 15: mod_base = OTHER; note = 2'O-methyluridine
  modified_base 16: mod_base = OTHER; note = 2'-fluoroadenosine
  modified_base 17: mod_base = OTHER; note = 2'O-methyluridine
  modified_base 18: mod_base = OTHER; note = 2'O-methyluridine
  modified_base 19: mod_base = OTHER; note = 2'O-methylguanosine
  modified_base 20: mod_base = OTHER; note = 2'O-methylguanosine
  modified_base 21: mod_base = OTHER; note = 2'O-methyluridine phosphorothioate
  modified_base 22: mod_base = OTHER; note = 2'O-methyladenosine phosphorothioate
  modified_base 23: mod_base = OTHER; note = 2'O-methyladenosine
taaaatcattttcttattggtaa

SEQ ID NO: 637 - RNA, 23 nt, synthetic construct
  source 1..23: mol_type = other RNA
  modified_base 1: mod_base = OTHER; note = Threo-nucleic acid (TNA) phosphonate uridine phosphorothioate
  modified_base 2: mod_base = OTHER; note = 2'-fluoroadenosine phosphorothioate
  modified_base 3: mod_base = OTHER; note = 2'O-methyladenosine
  modified_base 4: mod_base = OTHER; note = 2'O-methyladenosine
  modified_base 5: mod_base = OTHER; note = 2'O-methyladenosine
  modified_base 6: mod_base = OTHER; note = 2'-fluorouridine
  modified_base 7: mod_base = OTHER; note = 2'O-methylcytidine
  modified_base 8: mod_base = OTHER; note = 2'O-methyladenosine
  modified_base 9: mod_base = OTHER; note = 2'O-methyluridine
  modified_base 10: mod_base = OTHER; note = 2'O-methyluridine
  modified_base 11: mod_base = OTHER; note = 2'O-methyluridine
  modified_base 12: mod_base = OTHER; note = 2'O-methyluridine
  modified_base 13: mod_base = OTHER; note = 2'O-methylcytidine
  modified_base 14: mod_base = OTHER; note = 2'-fluorouridine
  modified_base 15: mod_base = OTHER; note = 2'O-methyluridine
  modified_base 16: mod_base = OTHER; note = 2'-fluoroadenosine
  modified_base 17: mod_base = OTHER; note = 2'O-methyluridine
  modified_base 18: mod_base = OTHER; note = 2'O-methyluridine
  modified_base 19: mod_base = OTHER; note = 2'O-methylguanosine
  modified_base 20: mod_base = OTHER; note = 2'O-methylguanosine
  modified_base 21: mod_base = OTHER; note = 2'O-methyluridine phosphorothioate
  modified_base 22: mod_base = OTHER; note = 2'O-methyladenosine phosphorothioate
  modified_base 23: mod_base = OTHER; note = 2'O-methyladenosine
taaaatcattttcttattggtaa

SEQ ID NO: 638 - RNA, 21 nt, synthetic construct
  source 1..21: mol_type = other RNA
  modified_base 1: mod_base = OTHER; note = 2'O-methyladenosine phosphorothioate
  modified_base 2: mod_base = OTHER; note = 2'O-methylcytidine phosphorothioate
  modified_base 3: mod_base = OTHER; note = 2'O-methylcytidine
  modified_base 4: mod_base = OTHER; note = 2'O-methyladenosine
  modified_base 5: mod_base = OTHER; note = 2'O-methyladenosine
  modified_base 6: mod_base = OTHER; note = 2'O-methyluridine
  modified_base 7: mod_base = OTHER; note = 2'-fluoroadenosine
  modified_base 8: mod_base = OTHER; note = 2'O-methyladenosine
  modified_base 9: mod_base = OTHER; note = 2'-fluoroguanosine
  modified_base 10: mod_base = OTHER; note = 2'-fluoroadenosine
  modified_base 11: mod_base = OTHER; note = 2'-fluoroadenosine
  modified_base 12: mod_base = OTHER; note = 2'O-methyladenosine
  modified_base 13: mod_base = OTHER; note = 2'O-methyladenosine
  modified_base 14: mod_base = OTHER; note = 2'O-methyluridine
  modified_base 15: mod_base = OTHER; note = 2'O-methylguanosine
  modified_base 16: mod_base = OTHER; note = 2'O-methyladenosine
  modified_base 17: mod_base = OTHER; note = 2'O-methyluridine
  modified_base 18: mod_base = OTHER; note = 2'O-methyluridine
  modified_base 19: mod_base = OTHER; note = 2'O-methyluridine
  modified_base 20: mod_base = OTHER; note = 2'O-methyluridine phosphorothioate
  modified_base 21: mod_base = OTHER; note = 2'O-methyluridine 6-(5-(((2R,3R,4R,5R,6R)-3-acetamido-4,5-dihydroxy-6-(hydrox ymethyl)tetrahydro-2H-pyran-2-yl)oxy)pentanamido)-N-(6-(4-( hydroxymethyl)-4-(methoxymethyl)piperidin-1-yl)-6-oxohexyl) hexanamide
accaataagaaaatgattttt

SEQ ID NO: 639 - RNA, 23 nt, synthetic construct
  source 1..23: mol_type = other RNA
  modified_base 1: mod_base = OTHER; note = 5'vinyl phosphonate 2'O-methyladenosine phosphorothioate
  modified_base 2: mod_base = OTHER; note = 2'-fluoroguanosine phosphorothioate
  modified_base 3: mod_base = OTHER; note = 2'O-methyladenosine
  modified_base 4: mod_base = OTHER; note = 2'O-methylcytidine
  modified_base 5: mod_base = OTHER; note = 2'O-methyladenosine
  modified_base 6: mod_base = OTHER; note = 2'-fluorouridine
  modified_base 7: mod_base = OTHER; note = 2',3'-seco nucleotide guanosine
  modified_base 8: mod_base = OTHER; note = 2'O-methyladenosine
  modified_base 9: mod_base = OTHER; note = 2'O-methylguanosine
  modified_base 10: mod_base = OTHER; note = 2'O-methylguanosine
  modified_base 11: mod_base = OTHER; note = 2'O-methyluridine
  modified_base 12: mod_base = OTHER; note = 2'O-methyluridine
  modified_base 13: mod_base = OTHER; note = 2'O-methyluridine
  modified_base 14: mod_base = OTHER; note = 2'-fluorouridine
  modified_base 15: mod_base = OTHER; note = 2'O-methylguanosine
  modified_base 16: mod_base = OTHER; note = 2'-fluoroadenosine
  modified_base 17: mod_base = OTHER; note = 2'O-methyluridine
  modified_base 18: mod_base = OTHER; note = 2'O-methyladenosine
  modified_base 19: mod_base = OTHER; note = 2'O-methylcytidine
  modified_base 20: mod_base = OTHER; note = 2'O-methylcytidine
  modified_base 21: mod_base = OTHER; note = 2'O-methyladenosine phosphorothioate
  modified_base 22: mod_base = OTHER; note = 2'O-methylguanosine phosphorothioate
  modified_base 23: mod_base = OTHER; note = 2'O-methyluridine
agacatgaggttttgataccagt

SEQ ID NO: 640 - RNA, 23 nt, synthetic construct
  source 1..23: mol_type = other RNA
  modified_base 1: mod_base = OTHER; note = 5'vinyl phosphonate 2'O-methyladenosine phosphorothioate
  modified_base 2: mod_base = OTHER; note = 2'-fluoroguanosine phosphorothioate
  modified_base 3: mod_base = OTHER; note = 2'O-methyladenosine
  modified_base 4: mod_base = OTHER; note = 2'O-methylcytidine
  modified_base 5: mod_base = OTHER; note = 2'O-methyladenosine
  modified_base 6: mod_base = OTHER; note = 2'-fluorouridine
  modified_base 7: mod_base = OTHER; note = 2'O-methyl-3',4'-seco-guanosine
  modified_base 8: mod_base = OTHER; note = 2'O-methyladenosine
  modified_base 9: mod_base = OTHER; note = 2'O-methylguanosine
  modified_base 10: mod_base = OTHER; note = 2'O-methylguanosine
  modified_base 11: mod_base = OTHER; note = 2'O-methyluridine
  modified_base 12: mod_base = OTHER; note = 2'O-methyluridine
  modified_base 13: mod_base = OTHER; note = 2'O-methyluridine
  modified_base 14: mod_base = OTHER; note = 2'-fluorouridine
  modified_base 15: mod_base = OTHER; note = 2'O-methylguanosine
  modified_base 16: mod_base = OTHER; note = 2'-fluoroadenosine
  modified_base 17: mod_base = OTHER; note = 2'O-methyluridine
  modified_base 18: mod_base = OTHER; note = 2'O-methyladenosine
  modified_base 19: mod_base = OTHER; note = 2'O-methylcytidine
  modified_base 20: mod_base = OTHER; note = 2'O-methylcytidine
  modified_base 21: mod_base = OTHER; note = 2'O-methyladenosine phosphorothioate
  modified_base 22: mod_base = OTHER; note = 2'O-methylguanosine phosphorothioate
  modified_base 23: mod_base = OTHER; note = 2'O-methyluridine
agacatgaggttttgataccagt

SEQ ID NO: 641 - RNA, 23 nt, synthetic construct
  source 1..23: mol_type = other RNA
  modified_base 1: mod_base = OTHER; note = 5'vinyl phosphonate 2'O-methyladenosine phosphorothioate
  modified_base 2: mod_base = OTHER; note = 2'-fluoroguanosine phosphorothioate
  modified_base 3: mod_base = OTHER; note = 2'O-methyladenosine
  modified_base 4: mod_base = OTHER; note = 2'O-methylcytidine
  modified_base 5: mod_base = OTHER; note = 2'O-methyladenosine
  modified_base 6: mod_base = OTHER; note = 3'-Hydroxy uridine
  modified_base 7: mod_base = OTHER; note = 2'O-methylguanosine
  modified_base 8: mod_base = OTHER; note = 2'O-methyladenosine
  modified_base 9: mod_base = OTHER; note = 2'O-methylguanosine
  modified_base 10: mod_base = OTHER; note = 2'O-methylguanosine
  modified_base 11: mod_base = OTHER; note = 2'O-methyluridine
  modified_base 12: mod_base = OTHER; note = 2'O-methyluridine
  modified_base 13: mod_base = OTHER; note = 2'O-methyluridine
  modified_base 14: mod_base = OTHER; note = 2'-fluorouridine
  modified_base 15: mod_base = OTHER; note = 2'O-methylguanosine
  modified_base 16: mod_base = OTHER; note = 2'-fluoroadenosine
  modified_base 17: mod_base = OTHER; note = 2'O-methyluridine
  modified_base 18: mod_base = OTHER; note = 2'O-methyladenosine
  modified_base 19: mod_base = OTHER; note = 2'O-methylcytidine
  modified_base 20: mod_base = OTHER; note = 2'O-methylcytidine
  modified_base 21: mod_base = OTHER; note = 2'O-methyladenosine phosphorothioate
  modified_base 22: mod_base = OTHER; note = 2'O-methylguanosine phosphorothioate
  modified_base 23: mod_base = OTHER; note = 2'O-methyluridine
agacatgaggttttgataccagt

SEQ ID NO: 642 - RNA, 23 nt, synthetic construct
  source 1..23: mol_type = other RNA
  modified_base 1: mod_base = OTHER; note = 5'vinyl phosphonate 2'O-methyladenosine phosphorothioate
  modified_base 2: mod_base = OTHER; note = 2'-fluoroguanosine phosphorothioate
  modified_base 3: mod_base = OTHER; note = 2'O-methyladenosine
  modified_base 4: mod_base = OTHER; note = 2'O-methylcytidine
  modified_base 5: mod_base = OTHER; note = 2'O-methyladenosine
  modified_base 6: mod_base = OTHER; note = 2'-fluorouridine
  modified_base 7: mod_base = OTHER; note = 3'-Hydroxy guanosine
  modified_base 8: mod_base = OTHER; note = 2'O-methyladenosine
  modified_base 9: mod_base = OTHER; note = 2'O-methylguanosine
  modified_base 10: mod_base = OTHER; note = 2'O-methylguanosine
  modified_base 11: mod_base = OTHER; note = 2'O-methyluridine
  modified_base 12: mod_base = OTHER; note = 2'O-methyluridine
  modified_base 13: mod_base = OTHER; note = 2'O-methyluridine
  modified_base 14: mod_base = OTHER; note = 2'-fluorouridine
  modified_base 15: mod_base = OTHER; note = 2'O-methylguanosine
  modified_base 16: mod_base = OTHER; note = 2'-fluoroadenosine
  modified_base 17: mod_base = OTHER; note = 2'O-methyluridine
  modified_base 18: mod_base = OTHER; note = 2'O-methyladenosine
  modified_base 19: mod_base = OTHER; note = 2'O-methylcytidine
  modified_base 20: mod_base = OTHER; note = 2'O-methylcytidine
  modified_base 21: mod_base = OTHER; note = 2'O-methyladenosine phosphorothioate
  modified_base 22: mod_base = OTHER; note = 2'O-methylguanosine phosphorothioate
  modified_base 23: mod_base = OTHER; note = 2'O-methyluridine
agacatgaggttttgataccagt

SEQ ID NO: 643 - RNA, 23 nt, synthetic construct
  source 1..23: mol_type = other RNA
  modified_base 1: mod_base = OTHER; note = 5'vinyl phosphonate 2'O-methyladenosine phosphorothioate
  modified_base 2: mod_base = OTHER; note = 2'-fluoroguanosine phosphorothioate
  modified_base 3: mod_base = OTHER; note = 2'O-methyladenosine
  modified_base 4: mod_base = OTHER; note = 2'O-methylcytidine
  modified_base 5: mod_base = OTHER; note = 2'O-methyladenosine
  modified_base 6: mod_base = OTHER; note = 3'-O-methyl uridine
  modified_base 7: mod_base = OTHER; note = 2'O-methylguanosine
  modified_base 8: mod_base = OTHER; note = 2'O-methyladenosine
  modified_base 9: mod_base = OTHER; note = 2'O-methylguanosine
  modified_base 10: mod_base = OTHER; note = 2'O-methylguanosine
  modified_base 11: mod_base = OTHER; note = 2'O-methyluridine
  modified_base 12: mod_base = OTHER; note = 2'O-methyluridine
  modified_base 13: mod_base = OTHER; note = 2'O-methyluridine
  modified_base 14: mod_base = OTHER; note = 2'-fluorouridine
  modified_base 15: mod_base = OTHER; note = 2'O-methylguanosine
  modified_base 16: mod_base = OTHER; note = 2'-fluoroadenosine
  modified_base 17: mod_base = OTHER; note = 2'O-methyluridine
  modified_base 18: mod_base = OTHER; note = 2'O-methyladenosine
  modified_base 19: mod_base = OTHER; note = 2'O-methylcytidine
  modified_base 20: mod_base = OTHER; note = 2'O-methylcytidine
  modified_base 21: mod_base = OTHER; note = 2'O-methyladenosine phosphorothioate
  modified_base 22: mod_base = OTHER; note = 2'O-methylguanosine phosphorothioate
  modified_base 23: mod_base = OTHER; note = 2'O-methyluridine
agacatgaggttttgataccagt

SEQ ID NO: 644 - RNA, 23 nt, synthetic construct
  source 1..23: mol_type = other RNA
  modified_base 1: mod_base = OTHER; note = 5'vinyl phosphonate 2'O-methyladenosine phosphorothioate
  modified_base 2: mod_base = OTHER; note = 2'-fluoroguanosine phosphorothioate
  modified_base 3: mod_base = OTHER; note = 2'O-methyladenosine
  modified_base 4: mod_base = OTHER; note = 2'O-methylcytidine
  modified_base 5: mod_base = OTHER; note = 2'O-methyladenosine
  modified_base 6: mod_base = OTHER; note = 2'-fluorouridine
  modified_base 7: mod_base = OTHER; note = 3'-O-methyl guanosine
  modified_base 8: mod_base = OTHER; note = 2'O-methyladenosine
  modified_base 9: mod_base = OTHER; note = 2'O-methylguanosine
  modified_base 10: mod_base = OTHER; note = 2'O-methylguanosine
  modified_base 11: mod_base = OTHER; note = 2'O-methyluridine
  modified_base 12: mod_base = OTHER; note = 2'O-methyluridine
  modified_base 13: mod_base = OTHER; note = 2'O-methyluridine
  modified_base 14: mod_base = OTHER; note = 2'-fluorouridine
  modified_base 15: mod_base = OTHER; note = 2'O-methylguanosine
  modified_base 16: mod_base = OTHER; note = 2'-fluoroadenosine
  modified_base 17: mod_base = OTHER; note = 2'O-methyluridine
  modified_base 18: mod_base = OTHER; note = 2'O-methyladenosine
  modified_base 19: mod_base = OTHER; note = 2'O-methylcytidine
  modified_base 20: mod_base = OTHER; note = 2'O-methylcytidine
  modified_base 21: mod_base = OTHER; note = 2'O-methyladenosine phosphorothioate
  modified_base 22: mod_base = OTHER; note = 2'O-methylguanosine phosphorothioate
  modified_base 23: mod_base = OTHER; note = 2'O-methyluridine
agacatgaggttttgataccagt
